(19) United States
(12) Patent Application Publication
(10) Pub. No.: US 2026/0070992 A1
(43) Pub. Date: Mar. 12, 2026

(54) ACTRII ANTIBODY FIXED UNIT DOSE TREATMENTS

(71) Applicant: VERSANIS BIO, INC., Indianapolis, IN (US)

(72) Inventor: Lloyd B. KLICKSTEIN, Newton, MA (US)

(21) Appl. No.: 19/105,371

(22) PCT Filed: Aug. 28, 2023
(86) PCT No.: PCT/US2023/072982

§ 371 Date: Feb. 21, 2025

Related U.S. Application Data
(60) Provisional application No. 63/373,684, filed on Aug. 26, 2022.
(60) Provisional application No. 63/378,128, filed on Oct. 3, 2022.

(51) Int. Cl. C07K 16/28; A61K 39/00; A61K 45/06; A61P 3/00

(52) U.S. Cl. CPC C07K 16/2863; A61K 45/06; A61P 3/00; A61K 2039/505; A61K 2039/545; C07K 2317/565

(57) ABSTRACT

Provided herein are compositions and methods for subcutaneous administration of a fixed unit dose of an ActRII antibody for disease treatment, wherein the treatment is administered across a range of subject body weights. As provided herein, the ActRII antibody fixed unit dose may include about 25 mg to about 600 mg, e.g., about 150 mg of an ActRII antibody, e.g., in a volume of about 1 ml.

### CROSS-REFERENCE TO RELATED APPLICATIONS

[0001] This application claims priority to U.S. Provisional Patent Application Nos. 63/373,684 filed Aug. 26, 2022, and 63/378,128 filed Oct. 3, 2022, the contents of which are incorporated herein by reference in their entirety.

### INCORPORATION BY REFERENCE OF SEQUENCE LISTING

[0002] The contents of the electronic sequence listing (VRNS_010_02WO_SeqList_ST26.xml; Size: 4,428,735 bytes; and Date of Creation: Aug. 25, 2023) are herein incorporated by reference in their entirety.

### BACKGROUND

[0003] Therapeutic antibodies are often administered based on a subject's body weight. Such customization however requires a medical professional to plan and administer the dose, among other things. An attractive alternative is to administer a fixed dose, which can be administered to subjects across a range of body weights. There is an added advantage that a fixed dose, could even be self-administered at home by the subject, for example using a hand-held subcutaneous injector. For therapeutic antibodies, fixed dosing however requires pharmacokinetic (PK) and pharmacodynamic (PD) optimization to achieve a desired range of exposure, while taking into account antigen affinity, antigen density, phagocytic clearance, IgG recycling, errors associated with erroneous self-administration, and the consequences of a missed dose. Lack of such PK/PD optimization would lead to ineffective dosing and would interfere with the efficacy of an otherwise life-saving treatment.

[0004] Treatments with ActRII antibodies are useful for a variety of diseases such as metabolic diseases, muscle wasting diseases, heart diseases, and liver diseases. Currently the clinical use of such antibodies does not include a fixed dosing paradigm. Thus, a need exists for PK/PD optimized fixed unit doses of ActRII antibodies, applicable across a range of body weights, and useful for self-administration, and accordingly are provided herein.

### SUMMARY

[0005] Provided herein are compositions and methods for subcutaneous administration of fixed unit doses of an ActRII antibody, which may be used to treat a variety of diseases, and wherein the fixed unit dose is administered to subjects with a range of body weights. In exemplary embodiments, a pharmaceutical composition in a fixed unit dose form comprises a dose of about 25 mg to about 600 mg of an ActRII antibody. In some exemplary embodiments, a pharmaceutical composition in a fixed unit dose form comprises a dose of about 100 to about 400 mg of an ActRII antibody. In some exemplary embodiments, the fixed unit dose comprises a dose of about 150 mg of an ActRII antibody. In some exemplary embodiments, the fixed unit dose comprises a dose of about 300 mg of an ActRII antibody.

[0006] In some embodiments, the ActRII antibody comprises the CDR amino acid sequences of SEQ ID NOS: 1-6. In some embodiments, the ActRII antibody comprises the VH amino acid sequence of SEQ ID NO: 7, or a sequence with at least 80% sequence identity thereto, and the VL amino acid sequence of SEQ ID NO: 8, or a sequence with at least 80% sequence identity thereto.

[0007] In some embodiments, the ActRII antibody comprises the amino acid sequence of SEQ ID NO: 9, or a sequence with at least 80% sequence identity thereto, and the amino acid sequence of SEQ ID NO: 10, or a sequence with at least 80% sequence identity thereto.

[0008] In some embodiments, the ActRII antibody comprises one or more of the CDR amino acid sequences of SEQ ID NOS: 11-75. In some embodiments, the ActRII antibody comprises one or more of the CDR amino acid sequences of SEQ ID NOS: 76-81. In some embodiments, the ActRII antibody comprises one or more of the CDR amino acid sequences of SEQ ID NOS: 82-5049.

[0009] In some embodiments, the ActRII antibody is specific for ActRIIA and/or ActRIIB.

[0010] In some embodiments, the ActRII antibody is present in the fixed unit dose in a concentration of about 25 mg/ml, about 50 mg/ml, about 75 mg/ml, about 100 mg/ml, about 125 mg/ml, about 150 mg/ml, about 175 mg/ml, about 200 mg/ml, about 225 mg/ml, about 250 mg/ml, about 275 mg/ml, about 300 mg/ml, about 325 mg/ml, about 350 mg/ml, about 375 mg/ml, about 400 mg/ml, about 425 mg/ml, about 450 mg/ml, about 475 mg/ml, about 500 mg/ml, about 525 mg/ml, about 550 mg/ml, about 575 mg/ml, or at about 600 mg/ml. In some embodiments, the ActRII antibody is present in the fixed unit dose in a concentration of about 150 mg/ml.

[0011] In some embodiments, the fixed unit dose is a volume of about 0.25 ml, about 0.5 ml, about 0.75 ml, about 1.0 ml, about 1.24 ml, about 1.5 ml, about 1.75 ml, about 2.0 ml, about 2.25 ml, about 2.5 ml, about 2.75 ml, about 3.0 ml, about 3.25 ml, about 3.5 ml, about 3.75 ml, about 4.0 ml, about 4.25 ml, about 4.5 ml, about 4.75 ml, or about 5.0 ml. In some embodiments, the fixed unit dose is a volume of about 1 ml. In some embodiments, the fixed unit dose is a volume of about 2 ml. In some embodiments, the composition is housed in an injector. In some embodiments, the injector is a needle or a syringe.

[0012] In some embodiments, the pharmaceutical composition comprises a hormone agonist and the ActRII antibody. In some embodiments, the hormone agonist is an incretin agonist. In some embodiments, the incretin agonist is selected from the group consisting of exenatide, exenatide extended-release, dulaglutide, liraglutide, lixisenatide, semaglutide, tirzepatide, cotadutide, noiiglutide, oxyntomodulin, retatrutide, albiglutide, beinaglutide, PEG-loxenatide, pemvidutide, and danuglipron.

[0013] In some embodiments, the hormone agonist is selected from the group consisting of long-acting amylin receptor agonists, dual amylin calcitonin receptor agonists (DACRAs), and Peptide YY agonists.

[0014] In some embodiments, provided herein is a method of treating a disease in a subject in need thereof, comprising subcutaneously administering to the subject a fixed unit dose of an ActRII antibody. In some embodiments, the ActRII antibody is present in at about 25 mg to about 600 mg per fixed unit dose. In some embodiments, the ActRII antibody is present in at about 100 mg to about 400 mg per fixed unit dose. In some embodiments, the ActRII antibody is present at about 150 mg per fixed unit dose. In some embodiments, the ActRII antibody is present at about 300 mg per fixed unit dose.

[0015] In some embodiments, the ActRII antibody fixed unit dose is administered to the subject about every day, about six times a week, about five times a week, about four times a week, about three times a week, about twice a week, about once every week, about once every two weeks, about every three weeks, about every four weeks, about every five weeks, about every six weeks, about every seven weeks, or about every eight weeks. In some embodiments, the ActRII antibody fixed unit dose is administered to the subject about once every week.

[0016] In some embodiments, administration of an ActRII antibody loading dose precedes administration of the ActRII antibody fixed unit dose. In some embodiments, the ActRII antibody loading dose is administered intravenously at about 3 mg/kg to about 50 mg/kg.

[0017] In some embodiments, the ActRII antibody loading dose is administered intravenously at about 10 mg/kg. In some embodiments, the ActRII antibody loading dose is administered intravenously at about 30 mg/kg.

[0018] In some embodiments, the ActRII antibody loading dose is administered in a dose of about 150 mg to about 4500 mg. In some embodiments, the ActRII antibody loading dose is administered in a dose of about 210 mg. In some embodiments, the ActRII antibody loading dose is administered in a dose of about 700 mg.

[0019] In some embodiments, the ActRII antibody loading dose is administered in a dose of about 25 mg to about 600 mg. In some embodiments, the ActRII antibody loading dose is administered in a dose of about 100 mg to about 400 mg. In some embodiments, the ActRII antibody loading dose is administered in a dose of about 150 mg. In some embodiments, the ActRII antibody loading dose is administered in a dose of about 300 mg. In some embodiments, the ActRII antibody loading dose is administered intravenously. In other embodiments, the ActRII antibody loading dose is administered subcutaneously.

[0020] In some embodiments, the ActRII antibody loading dose is administered about 1 day, about 2 days, about 3 days, about 4 days, about 5 days, about 6 days, about 1 week, about 2 weeks, about 3 weeks, about 4 weeks, or about 5 weeks before the administration of the ActRII antibody fixed unit dose.

[0021] In some embodiments, the subject's disease is a metabolic disease. In some embodiments, the metabolic disease is selected from the group consisting of: obesity, diabetes, metabolic syndrome, anti-psychotic drug-associated obesity, glucocorticoid-induced obesity, hypothalamic obesity associated with craniopharyngioma, and a monogenetic disorder associated with obesity.

[0022] In some embodiments, the monogenetic disorder associated with obesity is one of Bardet-Biedl syndrome, or obesity resulting from mutations in one or more of the genes comprising: ADCY3, ALMS1, ARL6, BBS1, BBS2, BBS4, BBS5, BBS7, BBS9, BBS10, BBS12, BDNF, CCDC28B, CEP290, CREBBP, EP300, GNAS, IER3IP1, MKKS, MKS1, MRAP2, NTRK2, PCSK1, PHF6, POMC, SH2B1, SIM1, TMEM67, TRIM32, TTC8 and VPS13B.

[0023] In some embodiments, the metabolic disease is Prader-Willi syndrome.

[0024] In some embodiments, the subject's disease is a muscle wasting disease or sarcopenia. In some embodiments, the subject's disease is aging related muscle dysfunction. In some embodiments, the subject's disease is heart disease. In some embodiments, the subject's disease is liver disease.

[0025] In some embodiments, the subject has a body mass index (BMI) of 30 or greater. The method of any one of claims 20-43, wherein the subject has a body mass index (BMI) of 27 or greater and has one or more obesity-related disorders. In some embodiments, the subject weighs about 200 kg or less. In some embodiments, the subject weighs more than about 200 kg.

[0026] In some embodiments, the ActRII antibody used in the method of treatment comprises the CDR amino acid sequences of SEQ ID NOS: 1-6. In some embodiments, the ActRII antibody comprises the VH amino acid sequence of SEQ ID NO: 7, or a sequence with at least 80% sequence identity thereto, and the VL amino acid sequence of SEQ ID NO: 8, or a sequence with at least 80% sequence identity thereto. In some embodiments, the ActRII antibody comprises the HC amino acid sequence of SEQ ID NO: 9, or a sequence with at least 80% sequence identity thereto, and the LC amino acid sequence of SEQ ID NO: 10, or a sequence with at least 80% sequence identity thereto.

[0027] In some embodiments, the ActRII antibody used in the method of treatment comprises the CDR amino acid sequences of one or more of SEQ ID NOS: 11-75. In some embodiments, the ActRII antibody used in the method of treatment comprises the CDR amino acid sequences of one or more of SEQ ID NOS: 76-81. In some embodiments, the ActRII antibody used in the method of treatment comprises the CDR amino acid sequences of one or more of SEQ ID NOS: 82-5049.

[0028] In some embodiments, the ActRII antibody is specific for ActRIIA and/or ActRIIB.

[0029] In some embodiments, the ActRII antibody is present in the fixed unit dose in a concentration of about 25 mg/ml, about 50 mg/ml, about 75 mg/ml, about 100 mg/ml, about 125 mg/ml, about 150 mg/ml, about 175 mg/ml, about 200 mg/ml, about 225 mg/ml, about 250 mg/ml, about 275 mg/ml, about 300 mg/ml, about 325 mg/ml, about 350 mg/ml, about 375 mg/ml, about 400 mg/ml, about 425 mg/ml, about 450 mg/ml, about 475 mg/ml, about 500 mg/ml, about 525 mg/ml, about 550 mg/ml, about 575 mg/ml, or at about 600 mg/ml.

[0030] In some embodiments, the fixed unit dose is a volume of about 0.25 ml, about 0.5 ml, about 0.75 ml, about 1.0 ml, about 1.24 ml, about 1.5 ml, about 1.75 ml, about 2.0 ml, about 2.25 ml, about 2.5 ml, about 2.75 ml, about 3.0 ml, about 3.25 ml, about 3.5 ml, about 3.75 ml, about 4.0 ml, about 4.25 ml, about 4.5 ml, about 4.75 ml, or about 5.0 ml.

[0031] In some embodiments, the fixed unit dose is housed in an injector configured for subcutaneous administration. In some embodiments, the injector is a needle or a syringe. In some embodiments, the fixed unit dose is designed to be self-administered.

[0032] In some embodiments, a hormone agonist is administered as a part of a combination therapy with the ActRII antibodies of the disclosure.

[0033] In some embodiments, the hormone agonist is an incretin agonist. In some embodiments, the incretin agonist is selected from the group consisting of exenatide, exenatide extended-release, dulaglutide, liraglutide, lixisenatide, semaglutide, tirzepatide, cotadutide, noiiglutide, oxyntomodulin, retatrutide, albiglutide, beinaglutide, PEG-loxenatide, pemvidutide, and danuglipron. In some embodiments, the hormone agonist is selected from the group consisting of long-acting amylin receptor agonists, dual amylin calcitonin receptor agonists (DACRAs), and Peptide YY agonists.

[0034] In some embodiments, the hormone agonist is administered prior to the ActRII antibody. In some embodiments, the ActRII antibody is administered prior to the hormone agonist. In some embodiments, the ActRII antibody and the hormone agonist are co-formulated to be administered as a combination therapy.

### BRIEF DESCRIPTION OF THE DRAWINGS

[0035] FIG. 1 is a schematic of an exemplary clinical study design that was implemented to evaluate the pharmacodynamics and pharmacokinetics of subcutaneous dosing of an ActRII antibody (BYM338, also known as bimagrumab).

[0036] FIG. 2 is a table of the demographics of the subjects, for the clinical study shown in FIG. 1.

[0037] FIG. 3 is a table of the physical characteristics of the subjects, prior to starting the study shown in FIG. 1.

[0038] FIG. 4 is a table of summarized PK parameters Cmax and Cmin from the study shown in FIG. 1.

[0039] FIG. 5 is a table summarizing PK parameters including Tmax and AUC from the study shown in FIG. 1.

[0040] FIG. 6 is a semi-log graph of model fit mean serum concentration profiles for intravenous administration of bimagrumab at 210 mg and 700 mg concentrations, from the study shown in FIG. 1.

[0041] FIG. 7 is a semi-log graph of model fit mean serum concentration profiles for subcutaneous infusion administration of bimagrumab at 1500 mg and 525 mg concentrations, from the study shown in FIG. 1.

[0042] FIG. 8 is a semi-log graph of model fit mean serum concentration profiles for subcutaneous bolus administration of bimagrumab at 150 mg, 300 mg, and 52.5 mg concentrations, from the study shown in FIG. 1.

[0043] FIG. 9 is a table summarizing the lean body mass and fat body mass results from the study shown in FIG. 1.

[0044] FIG. 10 is a line graph of the lean body mass results of intravenous infusion from the study shown in FIG. 1.

[0045] FIG. 11 is a line graph of the appendicular lean body mass results of intravenous infusion from the study shown in FIG. 1.

[0046] FIG. 12 is a line graph of the lean body mass results of subcutaneous infusion from the study shown in FIG. 1.

[0047] FIG. 13 is a line graph of the appendicular lean body mass results of subcutaneous infusion from the study shown in FIG. 1.

[0048] FIG. 14 is a line graph of the lean body mass results of subcutaneous bolus administration from the study shown in FIG. 1.

[0049] FIG. 15 is a line graph of the appendicular lean body mass results of subcutaneous bolus administration from the study shown in FIG. 1.

[0050] FIG. 16 is a line graph of the fat body mass results of intravenous infusion from the study shown in FIG. 1.

[0051] FIG. 17 is a line graph of the fat body mass results of subcutaneous infusion from the study shown in FIG. 1.

[0052] FIG. 18 is a line graph of the fat body mass results of subcutaneous bolus administration from the study shown in FIG. 1.

[0053] FIG. 19 is a line graph of model-predicted receptor occupancy (RO) of bimagrumab and associated dosing effects on fat body mass (FBM) loss and lean body mass (LBM) increase.

[0054] FIG. 20 is a line graph and table of model predicted time to reach various bimagrumab concentrations in a population of 2500 subjects, each weighing 100 kg, in which 300 mg bimagrumab is administered weekly and subcutaneously. Threshold levels of 5 μg/ml and 10 μg/ml are indicated in the graph and in the table below.

[0055] FIG. 21 is a line graph and table of model-predicted time to reach various bimagrumab concentrations in a population of 2500 subjects, of weights from 60 to 140 kg, in which 300 mg bimagrumab is administered weekly and subcutaneously. The time to threshold levels of 5 μg/ml and 10 μg/ml are indicated in the table below.

[0056] FIG. 22 is a line graph of model-predicted bimagrumab concentration over time in a population of subjects, of weights from 50 to 200 kg, in which 300 mg bimagrumab is administered weekly and subcutaneously without a loading dose on day 1.

[0057] FIG. 23 is a line graph of model-predicted change in total fat body mass over time in a population of subjects, of weights from 50 to 200 kg, in which 300 mg bimagrumab is administered weekly and subcutaneously without a loading dose on day 1.

[0058] FIG. 24 is a line graph of model-predicted bimagrumab concentration over time in a population of subjects, of weights from 50 to 200 kg, in which 300 mg bimagrumab is administered weekly and subcutaneously with two doses of 300 mg bimagrumab administered subcutaneously on day 1.

[0059] FIG. 25 is a line graph of model-predicted change in total fat body mass over time in a population of subjects, of weights from 50 to 200 kg, in which 300 mg bimagrumab is administered weekly and subcutaneously with two doses of 300 mg bimagrumab administered subcutaneously on day 1.

[0060] FIG. 26 is a line graph of model-predicted bimagrumab concentration over time in a population of subjects, of weights from 50 to 200 kg, in which 300 mg bimagrumab is administered weekly and subcutaneously with three doses of 300 mg bimagrumab administered subcutaneously on day 1.

[0061] FIG. 27 is a line graph of model predicted change in total fat body mass over time in a population of subjects, of weights from 50 to 200 kg, in which 300 mg bimagrumab is administered weekly and subcutaneously with three doses of 300 mg bimagrumab administered subcutaneously on day 1.

[0062] FIG. 28 is a line graph of a model predicted comparison of the effect of loading doses (0, 1, or 2 loading doses) on bimagrumab concentration over time in a population of subjects weighing 100 kg in which in which 300 mg bimagrumab is administered weekly and subcutaneously.

[0063] FIG. 29 is a line graph of a model predicted comparison of the effect of loading doses (0, 1, or 2 loading doses) on the change in total fat body mass overtime for a population of subjects with a weight of 100 kg in which in which 300 mg bimagrumab is administered weekly and subcutaneously.

[0064] FIG. 30 is a line graph of model-predicted bimagrumab concentration over time in a population of subjects, of weights from 50 to 200 kg, in which 600 mg bimagrumab is administered weekly and subcutaneously without a loading dose on day 1.

[0065] FIG. 31 is a line graph of model-predicted change in total fat body mass over time in a population of subjects, of weights from 50 to 200 kg, in which 600 mg bimagrumab is administered weekly and subcutaneously without a loading dose on day 1.

[0066] FIG. 32 is a line graph of the model-predicted effect of bimagrumab concentration on fat body mass and lean body mass in a population of subjects with individual variability of response.

[0067] FIG. 33 is a line graph of model-predicted bimagrumab concentration over time in a population of subjects with individual variability of response. Subject weights range from 50 to 200 kg and 300 mg bimagrumab is administered weekly and subcutaneously without a loading dose on day 1.

### DETAILED DESCRIPTION

### I. Definitions

[0068] Unless otherwise defined herein, scientific and technical terms used herein shall have the meanings that are commonly understood by those of ordinary skill in the art. Generally, nomenclature used in connection with, and techniques of, chemistry, molecular biology, cell biology, immunology, pharmacology, and protein chemistry, described herein, are those well-known and commonly used in the art.

[0069] It must be noted that, as used herein and in the appended claims, the singular forms “a,” “and,” and “the” include plural referents unless the context clearly dictates otherwise. Thus, for example, reference to “an agent” refers to one or mixtures of such candidates, and reference to “a method” includes reference to equivalent steps and methods known to those skilled in the art, and so forth.

[0070] As used herein, the term “approximately” or “about,” as applied to one or more values of interest, refers to a value that is similar in magnitude and/or within a similar range to a stated reference value. In certain embodiments, the term “approximately” or “about” refers to a range of values that fall within 15%, 14%, 13%, 12%, 11%, 10%, 9%, 8%, 7%, 6%, 5%, 4%, 3%, 2%, 1%, or less in either direction (greater than or less than) of the stated reference value unless otherwise stated or otherwise evident from the context (except where such number would exceed 100% of a possible value).

[0071] As used herein, the terms “polypeptide,” “peptide,” and “protein” refer to polymers of amino acids of any length. The terms also encompass an amino acid polymer that has been modified; for example, to include disulfide bond formation, glycosylation, lipidation, phosphorylation, or conjugation with a labeling component.

[0072] As used herein, the terms “identity” and “identical,” when referring to a comparison of two sequences, refers to the percentage of exact matching residues in an alignment of a sequence provided herein to a reference sequence, such as an alignment generated by a BLAST algorithm or other alignment algorithms known in the art. Identity may be calculated based on an alignment of a full-length sequence provided herein and a full-length reference sequence. Identity may also be calculated based on a partial alignment of a sequence provided herein and a reference sequence, if the reference sequence is longer than a sequence provided herein. Identity may also be calculated based on a partial alignment of a sequence provided herein and a reference sequence, if the reference sequence is shorter than a sequence provided herein. Thus, when aligning two sequences, according to the aforementioned, a query sequence “shares at least x % identity to” a subject sequence if in the alignment of the two sequences, at least x % (rounded down) of the residues in the subject sequence are aligned as an exact match to a corresponding residue in the query sequence, wherein the numerator is the number of exact matches and the denominator is the length of the query sequence. In some embodiments, the denominator may alternatively be the length of the query sequence minus any gaps of two or more non-matching residues. Where the subject sequence has variable positions (e.g., residues denoted X), an alignment to any residue in the query sequence is counted as a match.

[0073] As used herein, “antibody” includes reference to an immunoglobulin molecule immunologically reactive with a particular antigen, including both polyclonal and monoclonal antibodies. The term includes humanized antibodies, chimeric antibodies e.g., murine variable region with a human constant region) and conjugated antibodies. The term “antibody” also includes antigen binding forms of antibodies, including fragments that retain antigen-binding capability (e.g., Fab′, F(ab′)₂, Fab, single chain variable fragments (scFv) containing VH and VL sequences linked together in one chain, and single chain antibody fragments (scAb). The term antibody also includes bivalent or bispecific molecules, diabodies, triabodies, and tetrabodies.

[0074] The terms “treatment”, “treating” and the like are used herein to generally mean obtaining a desired pharmacologic and/or physiologic effect with a therapeutic agent. The effect may be prophylactic in terms of completely or partially preventing a disease or symptom thereof, e.g., reducing the likelihood that the disease or symptom thereof occurs in the subject, and/or may be therapeutic in terms of completely or partially reducing a symptom, or a partial or complete cure for a disease and/or adverse effect attributable to the disease. “Treatment” as used herein covers any treatment of a disease in a mammal, and includes: (a) preventing the disease from occurring in a subject which may be predisposed to the disease but has not yet been diagnosed as having it; (b) inhibiting or slowing the onset or development of the disease; or (c) relieving the disease, e.g., causing regression of the disease or symptoms associated with the disease. The therapeutic agent may be administered before, during or after the onset of disease. The treatment of ongoing disease, where the treatment stabilizes or reduces the undesirable clinical symptoms of the patient, may be of particular interest. In some embodiments, treatment is performed prior to complete loss of function in the affected tissues. In some embodiments, the subject's treatment will be administered during the symptomatic stage of the disease, and in some embodiments, after the symptomatic stage of the disease.

[0075] The terms “disease” and “disorder” may be used interchangeably to describe any affliction affecting the subject and for which there is one or more symptoms.

[0076] The term “dose,” as used herein, refers to the amount of therapeutic agent administered to a subject to achieve a therapeutic objective.

[0077] The term “fixed dose” as used herein, refers to a dose that is not individualized to a particular subject. The fixed dose may be applicable to a population of subjects with a range of body weights.

[0078] The term “loading dose” refers to one or more doses of a therapeutic agent that are administered in addition to a treatment comprising a periodic administration of a fixed unit dose. As used herein a “loading dose” may refer to one or more doses of a therapeutic agent which are the same concentration, a lower concentration, or a higher concentration than the fixed unit dose. In some embodiments, a loading dose is administered prior to the start of a treatment comprising a periodic administration of a fixed unit dose. In some embodiments, a loading dose is administered simultaneous with the start of a treatment comprising a periodic administration of a fixed unit dose.

[0079] The terms “individual,” “subject,” and “patient” are used interchangeably herein and refer to any subject for whom treatment is desired. The subject may be a mammalian subject. Mammalian subjects include, e. g., humans, non-human primates, rodents, (e.g., rats, mice), lagomorphs (e.g., rabbits), ungulates (e.g., cows, sheep, pigs, horses, goats, and the like), etc. In some embodiments, the subject is a human. In some embodiments, the subject is a non-human primate, for example a cynomolgus monkey. In some embodiments, the subject is a companion animal (e.g., cats, dogs).

### II. ActRII Antibodies

[0080] The disclosure provides compositions and methods for subcutaneous administration of ActRII antibodies at fixed unit doses, which may be used to treat a range of diseases, and wherein the fixed unit dose is administered to subjects with a range of body weights. In exemplary embodiments, an ActRII antibody fixed unit dose comprises about 25 mg to about 600 mg of an ActRII antibody administered subcutaneously. In some exemplary embodiments, an ActRII antibody fixed unit dose comprises about 100 mg to about 400 mg of an ActRII antibody administered subcutaneously. In some exemplary embodiments, an ActRII antibody fixed unit dose comprises about 300 mg of an ActRII antibody administered subcutaneously. In some exemplary embodiments, an ActRII antibody fixed unit dose comprises about 150 mg of an ActRII antibody administered subcutaneously. As provided herein, treatments comprising periodic administration of an ActRII antibody fixed unit dose may be used to treat diseases, including but not limited to: metabolic diseases, muscle wasting diseases, heart diseases, and liver diseases.

[0081] The fixed unit doses provided herein comprise ActRII antibodies that bind to the activin receptors ActRIIA and/or ActRIIB. The administration of ActRII antibodies has been previously shown to not only increase lean muscle mass, but also to decrease fat mass and improve glycemic control in clinical studies (WO2010125003A1, WO2018116201A1, and WO2021044287A1 the contents of which are incorporated in their entirety, and Heymsfield et al. 2021; 4 (1):e2033457, JAMA).

### Exemplary Antibodies

[0082] In some embodiments, exemplary antibodies of the disclosure comprise the sequence of bimagrumab (BYM338). The below table provides the relevant complementary determining region (CDR), variable heavy chain (VH), variable light chain (VL), heavy chain (HC), and light chain (LC) amino acid sequences for bimagrumab. In some embodiments, exemplary antibodies of the disclosure comprise the sequences related to bimagrumab (BYM338).

Bimagrumab Heavy Chain Complementarity
Determining Regions (CDRs)
CDRH1-
(SEQ ID NO: 1)
GYTFTSSYIN
CDRH2-
(SEQ ID NO: 2)
TINPVSGSTSYAQKFQ
CDRH3-
(SEQ ID NO: 3)
GGWFDY
Bimagrumab Light Chain Complementarity
Determining Regions (CDRs)
CDRL1-
(SEQ ID NO: 4)
TGTSSDVGSYNYVN
CDRL2-
(SEQ ID NO: 5)
MIYGVSKRPS
CDRL3-
(SEQ ID NO: 6)
GTFAGGSYYG
Bimagrumab Variable Heavy Chain (VH)
(SEQ ID NO: 7)
[sequence omitted]
Bimagrumab Variable Light Chain (VL)
(SEQ ID NO: 8)
QSALTQPASVSGSPGQSITISCTGTSSDVGSYNYVNWYQQHPGKAPK
LMIYGVSKRPSGVSNRFSGSKSGNTASLTISGLQAEDEADYYCGTFA
GGSYYGVFGGGTKLTVLGQ
Bimagrumab Heavy Chain (HC)
(SEQ ID NO: 9)
QVQLVQSGAEVKKPGASVKVSCKASGYTFTSSYINWVRQAPGQGLEW
MGTINPVSGSTSYAQKFQGRVTMTRDTSISTAYMELSRLRSDDTAVY
YCARGGWFDYWGQGTLVTVSSASTKGPSVFPLAPSSKSTSGGTAALG
CLVKDYFPEPVTVSWNSGALTSGVHTFPAVLQSSGLYSLSSVVTVPS
SSLGTQTYICNVNHKPSNTKVDKRVEPKSCDKTHTCPPCPAPEAAGG
PSVFLFPPKPKDTLMISRTPEVTCVVVDVSHEDPEVKFNWYVDGVEV
HNAKTKPREEQYNSTYRVVSVLTVLHQDWLNGKEYKCKVSNKALPAP
IEKTISKAKGQPREPQVYTLPPSREEMTKNQVSLTCLVKGFYPSDIA
VEWESNGQPENNYKTTPPVLDSDGSFFLYSKLTVDKSRWQQGNVFSC
SVMHEALHNHYTQKSLSLSPGK
Bimagrumab Light Chain (LC)
(SEQ ID NO: 10)
QSALTQPASVSGSPGQSITISCTGTSSDVGSYNYVNWYQQHPGKAPK
LMIYGVSKRPSGVSNRFSGSKSGNTASLTISGLQAEDEADYYCGTFA
GGSYYGVFGGGTKLTVLGQPKAAPSVTLFPPSSEELQANKATLVCLI
SDFYPGAVTVAWKADSSPVKAGVETTTPSKQSNNKYAASSYLSLTPE
QWKSHRSYSCQVTHEGSTVEKTVAPTECS

[0083] In some embodiments, exemplary ActRII antibodies of the disclosure comprise a variable heavy chain comprising the CDR amino acid sequences of SEQ ID NO: 1 (CDRH1), SEQ ID NO: 2 (CDRH2), and SEQ ID NO: 3 (CDRH3).

[0084] In some embodiments, exemplary ActRII antibodies of the disclosure comprise a variable light chain comprising the CDR amino acid sequences of SEQ ID NO: 4 (CDRL1), SEQ ID NO: 5 (CDRL2), and SEQ ID NO: 6 (CDRL3).

[0085] In some embodiments, exemplary ActRII antibodies of the disclosure comprise a variable heavy chain comprising the CDR amino acid sequences of SEQ ID NO: 1 (CDRH1), SEQ ID NO: 2 (CDRH2), and SEQ ID NO: 3 (CDRH3); and comprise a variable light chain comprising the CDR amino acid sequences of SEQ ID NO: 4 (CDRL1), SEQ ID NO: 5 (CDRL2), and SEQ ID NO: 6 (CDRL3).

[0086] In some embodiments, exemplary ActRII antibodies of the disclosure comprise a variable heavy chain (VH) comprising the amino acid sequence of SEQ ID NO: 7, or an amino acid sequence with at least 80%, 81%, 82%, 83%, 84%, 85%, 86%, 87%, 88%, 89%, 90%, 91%, 92%, 93%, 94%, 95%, 96%, 97%, 98%, or 99% sequence identity thereto; and/or a variable light chain (VL) comprising the amino acid sequence of SEQ ID NO: 8, or an amino acid sequence with at least 80%, 81%, 82%, 83%, 84%, 85%, 86%, 87%, 88%, 89%, 90%, 91%, 92%, 93%, 94%, 95%, 96%, 97%, 98%, or 99% sequence identity thereto.

[0087] In some embodiments, exemplary ActRII antibodies of the disclosure comprise a heavy chain (HC) comprising the amino acid sequence of SEQ ID NO: 9, or an amino acid sequence with at least 80%, 81%, 82%, 83%, 84%, 85%, 86%, 87%, 88%, 89%, 90%, 91%, 92%, 93%, 94%, 95%, 96%, 97%, 98%, or 99% sequence identity thereto; and/or a light chain (LC) comprising the amino acid sequence of SEQ ID NO: 10, or an amino acid sequence with at least 80%, 81%, 82%, 83%, 84%, 85%, 86%, 87%, 88%, 89%, 90%, 91%, 92%, 93%, 94%, 95%, 96%, 97%, 98%, or 99% sequence identity thereto.

[0088] In some embodiments, an ActRII antibody binds to ActRIIB with a KD of 100 nM or less, 10 nM or less, 1 nM or less. Preferably, an ActRII antibody binds to ActRIIB with an affinity of 100 pM or less (e.g. 100 pM, 50 pM, 10 pM, 1 pM or less). In some embodiments, an ActRII antibody binds to ActRIIB with an affinity of between 10 and 20 pM.

[0089] In some embodiments, an ActRII antibody binds to ActRIIB with a 5-fold greater affinity than to ActRIIA, more preferably 10-fold, still more preferably 50-fold, still more preferably 100-fold. In some embodiments, an ActRII antibody binds to ActRIIA with an affinity of 100 pM or more (i.e., 250 pM, 500 pM, 1 nM, 5 nM or more).

[0090] In some embodiments, ActRII antibodies of the disclosure comprise one or more CDRs of SEQ ID NOS: 11-75, as provided in WO2017156488, the content of which is herein incorporated by reference in its entirety. It is noted that the CDR sequences of SEQ ID NOS: 11-75 include the combinations of 6 CDRs described in WO2017156488, in which the ActRII antibodies are any of the antibodies of the A-H lineages, e.g., as provided in Table 1 of WO2017156488.

[0091] In some embodiments, ActRII antibodies of the disclosure comprise one or more CDRs of SEQ ID NOS: 76-81, as provided in WO2012064771, the content of which is herein incorporated by reference in its entirety. It is noted that the 6 CDR sequences of SEQ ID NOS: 76-81 correspond to the CDR sequences of SEQ ID NOS: 4-9, respectively of WO2012064771, wherein the antibody is Ab-14E1.

[0092] In some embodiments, ActRII antibodies of the disclosure comprise one or more CDRs of SEQ ID NO: 82-5049, as provided in WO2018183376, the content of which is herein incorporated by reference in its entirety. It is noted that the CDR sequences of SEQ ID NOS: 82-5049 include the combinations of 6 CDRs described in WO2018183376, in which the antibodies are any of the ActRII antibodies of the A-H lineages, e.g., as provided in Tables 3A-3F, of WO2018183376.

### III. ActRII Antibody Fixed Unit Dose

[0093] The compositions and methods provided herein comprise an ActRII antibody fixed unit dose configured to be administered subcutaneously. In exemplary embodiments, an ActRII antibody fixed unit dose of the disclosure comprises about 25 mg to about 600 mg of ActRII antibody per fixed unit dose. In some exemplary embodiments, an ActRII antibody fixed unit dose of the disclosure comprises about 100 mg to about 400 mg of ActRII antibody per fixed unit dose. In some exemplary embodiments, an ActRII antibody fixed unit dose comprises about 300 mg of ActRII antibody per fixed unit dose. In some exemplary embodiments, an ActRII antibody fixed unit dose comprises about 150 mg of ActRII antibody per fixed unit dose.

[0094] In other embodiments, an ActRII antibody fixed unit dose of the disclosure comprises about 100 mg to about 400 mg of an ActRII antibody. In some embodiments, an ActRII antibody fixed unit dose of the disclosure comprises about 100 mg to about 400 mg of an ActRII antibody, administered weekly and subcutaneously.

[0095] In exemplary embodiments, an ActRII antibody fixed unit dose comprises about 300 mg of an ActRII antibody. In some exemplary embodiments, a composition comprises a fixed unit dose of about 300 mg of an ActRII antibody, administered weekly and subcutaneously.

[0096] In exemplary embodiments, an ActRII antibody fixed unit dose comprises about 150 mg of an ActRII antibody. In some exemplary embodiments, a composition comprises a fixed unit dose of about 150 mg of an ActRII antibody, administered weekly and subcutaneously.

[0097] In some embodiments, the ActRII antibody may be present in the ActRII antibody fixed unit dose at about 25 mg, about 50 mg, about 75 mg, about 100 mg, about 125 mg, about 150 mg, about 175 mg, about 200 mg, about 225 mg, about 250 mg, about 275 mg, about 300 mg, about 325 mg, about 350 mg, about 375 mg, about 400 mg, about 425 mg, about 450 mg, about 475 mg, about 500 mg, about 525 mg, about 550 mg, about 575 mg, or at about 600 mg per fixed unit dose. In some exemplary embodiments the ActRII antibody is present at about 100 mg to about 400 mg per fixed unit dose. In exemplary embodiments, the ActRII antibody is present at about 300 mg per fixed unit dose. In other exemplary embodiments the ActRII antibody is present at about 150 mg per fixed unit dose.

[0098] In some embodiments, the ActRII antibody is present in the ActRII antibody fixed unit dose in a concentration of about 25 mg/ml, about 50 mg/ml, about 75 mg/ml, about 100 mg/ml, about 125 mg/ml, about 150 mg/ml, about 175 mg/ml, about 200 mg/ml, about 225 mg/ml, about 250 mg/ml, about 275 mg/ml, about 300 mg/ml, about 325 mg/ml, about 350 mg/ml, about 375 mg/ml, about 400 mg/ml, about 425 mg/ml, about 450 mg/ml, about 475 mg/ml, about 500 mg/ml, about 525 mg/ml, about 550 mg/ml, about 575 mg/ml, or at about 600 mg/ml. In some embodiments, the ActRII antibody is present in the ActRII antibody fixed unit dose in a concentration of about 150 mg/ml.

[0099] In some embodiments, the ActRII antibody fixed unit dose comprises a volume of about 0.25 ml, about 0.5 ml, about 0.75 ml, about 1.0 ml, about 1.24 ml, about 1.5 ml, about 1.75 ml, about 2.0 ml, about 2.25 ml, about 2.5 ml, about 2.75 ml, about 3.0 ml, about 3.25 ml, about 3.5 ml, about 3.75 ml, about 4.0 ml, about 4.25 ml, about 4.5 ml, about 4.75 ml, or about 5.0 ml. In some embodiments, the ActRII antibody fixed unit dose comprises a volume of about 1 ml. In some embodiments, the ActRII antibody fixed unit dose comprises a volume of about 2 ml. In some embodiments, the ActRII antibody fixed unit dose comprises any of the aforementioned concentrations in any of the aforementioned volumes.

[0100] In some embodiments, the ActRII antibody fixed unit dose is administered periodically to subjects with a body weight of 200 kg or less. In some embodiments, the ActRII antibody fixed unit dose is administered periodically to subjects with a body weight of 300 kg or less. In some embodiments the ActRII antibody fixed unit dose is administered periodically to subjects with a body weight of 200 kg or greater as two fixed unit doses. In some embodiments the ActRII antibody fixed unit dose is administered periodically to subjects with a body weight of 300 kg or greater as two fixed unit doses. In some embodiments, the number of ActRII antibody fixed unit doses administered periodically increases step-wise with a subject's body weight. In some embodiments, the number of fixed unit doses increases about every 50 kg, about every 75 kg, about every 100 kg, about every 150 kg, about every 200 kg, or about every 300 kg of a subject's body weight.

[0101] In some embodiments, the ActRII antibody fixed unit dose is administered periodically to a subject every day, about six times a week, about five times a week, about four times a week, about three times a week, about twice a week, about once every week, or about once every two weeks. In some embodiments, the ActRII antibody fixed unit dose is administered periodically to a subject about every three weeks, about every four weeks, about every five weeks, about every six weeks, about every seven weeks, or about every eight weeks. In exemplary embodiments, the ActRII antibody fixed unit dose is administered periodically to the subject about once every week.

[0102] In some embodiments, the ActRII antibody fixed unit dose is administered to the subject for about a month, for about two months, for about three months, for about six months, for about a year, for about two years, for about five years, or indefinitely.

### Loading Dose

[0103] In some embodiments, administration of an ActRII antibody loading dose precedes the administration of an ActRII fixed unit dose. Without being bound by theory or mechanism, it is thought that administration of a loading dose decreases the time required to achieve a desired serum concentration of the ActRII fixed unit dose treatment. Accordingly, in some embodiments, the inclusion of one or more loading doses are provided herein.

[0104] A loading dose may be administered by any route of administration, including but not limited to subcutaneous or intravenous administration, irrespective of the subsequent subcutaneous administration of the fixed unit dose.

[0105] In some embodiments, one or more loading doses of an ActRII antibody are administered to a subject in need thereof at day 0 or week 0, prior to the administration of the ActRII antibody fixed unit dose. In some embodiments, one or more loading doses of an ActRII antibody are provided 1 day, about 2 days, about 3 days, about 4 days, about 5 days, about 6 days, about 1 week, about 2 weeks, about 3 weeks, or about 4 weeks, before administration of an ActRII antibody fixed unit dose. In some embodiments, one or more loading doses of an ActRII antibody are administered the same day or within 24 hours of an ActRII antibody fixed unit dose. In some embodiments, one loading dose is administered. In some embodiments, two loading doses are administered. In some embodiments, three loading doses are administered.

[0106] In some embodiments, a loading dose may be administered intravenously in a concentration of about 3 mg/kg per the subject's body weight to about 50 mg/kg per the subject's body weight, and all amounts in between. In some embodiments, an ActRII antibody loading dose is administered intravenously at about 30 mg/kg per the subject's body weight. In some embodiments, an ActRII antibody loading dose is administered intravenously at about 10 mg/kg per the subject's body weight.

[0107] In some embodiments, the ActRII antibody loading dose is administered in a dose of about 150 mg to about 4500 mg. In some embodiments, the ActRII antibody loading dose is administered in a dose of about 100 mg, about 150 mg, about 200 mg, about 250 mg, about 300 mg, about 350 mg, about 400 mg, about 450 mg, about 500 mg, about 550 mg, about 600 mg, about 650 mg, about 700 mg, about 750 mg, about 800 mg, about 850 mg, about 900 mg, about 950 mg, about 1000 mg, about 1100 mg, about 1200 mg, about 1300 mg, about 1400 mg, about 1500 mg, about 1600 mg, about 1700 mg, about 1800 mg, about 1900 mg, about 2000 mg, about 2500 mg, about 3000 mg, about 4000 mg, about 4500 mg, about 5000 mg, about 5500 mg, or about 6000 mg. In some embodiments, the ActRII antibody loading dose is administered in a dose of about 210 mg. In some embodiments, the ActRII antibody loading dose is administered in a dose of about 700 mg.

[0108] In some embodiments, an ActRII antibody loading dose is administered in a dose of about 25 mg to about 600 mg. In some embodiments, an ActRII antibody loading dose is administered in a dose of about 100 mg to about 400 mg. In some embodiments, an ActRII antibody loading dose is administered in a dose of about 25 mg, about 50 mg, about 75 mg, about 100 mg, about 125 mg, about 150 mg, about 175 mg, about 200 mg, about 225 mg, about 250 mg, about 275 mg, about 300 mg, about 325 mg, about 350 mg, about 375 mg, about 400 mg, about 425 mg, about 450 mg, about 475 mg, about 500 mg, about 525 mg, about 550 mg, about 575 mg, or at about 600 mg. In some embodiments, an ActRII antibody loading dose is administered subcutaneously in a fixed unit dose of about 300 mg. In some embodiments, an ActRII antibody loading dose is administered subcutaneously in a fixed unit dose of about 150 mg.

[0109] In some embodiments, an ActRII antibody loading dose is administered subcutaneously. In some embodiments, an ActRII antibody loading dose is administered intravenously.

[0110] In some embodiments, one or more ActRII antibody loading doses are administered intravenously prior to administration of an ActRII antibody fixed unit dose of the disclosure.

[0111] In some embodiments, one or more ActRII antibody loading doses are administered subcutaneously prior to administration of an ActRII antibody fixed unit dose of the disclosure.

### Devices

[0112] As described herein, the fixed unit doses of the disclosure are configured for subcutaneous administration. In some embodiments, such an ActRII antibody fixed unit dose is housed in an autoinjector or other mechanical injection device. In some embodiments, such an ActRII antibody fixed unit dose is administered via a needle or syringe.

[0113] In some embodiments, such an ActRII antibody fixed unit dose is administered via an autoinjector or other mechanical injection device to subjects with a range of body weights. In some embodiments, an ActRII antibody fixed unit dose is designed to be self-administered via an autoinjector or other mechanical injection device.

[0114] In some embodiments, an ActRII antibody fixed unit dose is designed to be administered via needle or syringe to subjects with a range of body weights. In some embodiments, an ActRII antibody fixed unit dose is designed to be self-administered via a needle or syringe.

[0115] In exemplary embodiments, a composition, comprising a fixed unit dose of about 300 mg of an ActRII antibody, is designed to be administered subcutaneously and weekly via an autoinjector or other mechanical injection device.

[0116] In exemplary embodiments, a composition, comprising a fixed unit dose of about 300 mg of an ActRII antibody, is designed to be administered subcutaneously and weekly via a needle or syringe.

[0117] In other exemplary embodiments, a composition, comprising a fixed unit dose of about 150 mg of an ActRII antibody, is designed to be administered subcutaneously and weekly via an autoinjector or other mechanical injection device.

[0118] In exemplary embodiments, a composition, comprising a fixed unit dose of about 150 mg of an ActRII antibody, is designed to be administered subcutaneously and weekly via a needle or syringe.

### Subjects and Treatment

[0119] Provided herein are methods of treating a disease in a subject in need thereof, comprising subcutaneously administering to the subject a fixed unit dose of an ActRII antibody, wherein the fixed unit dose is administered to subjects with a range of body weights. An ActRII antibody fixed unit dose as part of a treatment provided herein may be used to treat a variety of diseases, including but not limited to: metabolic diseases, muscle wasting diseases, age-related muscle degeneration, heart diseases, and liver diseases.

[0120] In exemplary embodiments, treatments provided herein comprising an ActRII antibody in a fixed unit dose of about 25 mg to about 600 mg are useful for the treatment of metabolic diseases, muscle wasting diseases, age-related muscle degeneration, heart diseases, and liver diseases. In some exemplary embodiments, treatments provided herein comprising an ActRII antibody in a fixed unit dose of about 100 mg to about 400 mg are useful for the treatment of metabolic diseases, muscle wasting diseases, age-related muscle degeneration, heart diseases, and liver diseases. In some exemplary embodiments, treatments provided herein comprising an ActRII antibody in a fixed unit dose of about 300 mg, are useful for the treatment of metabolic diseases, muscle wasting diseases, age-related muscle degeneration, heart diseases, and liver diseases. In other exemplary embodiments, treatments provided herein comprising an ActRII antibody in a fixed unit dose of about 150 mg, are useful for the treatment of metabolic diseases, muscle wasting diseases, age-related muscle degeneration, heart diseases, and liver diseases.

[0121] In some embodiments, treatments provided herein comprising ActRII antibody fixed unit doses may be used to treat heart diseases, including but not limited to heart failure with preserved ejection fraction, heart failure with reduced ejection fraction, and heart failure with moderately reduced ejection fraction.

[0122] In some embodiments, treatments provided herein comprising an ActRII antibody fixed unit doses may be used to treat liver diseases, including but not limited to non-alcoholic fatty liver disease, e.g., non-alcoholic steatohepatitis.

[0123] In some embodiments, treatments provided herein comprising ActRII antibody fixed unit doses may be used to treat metabolic diseases, including but not limited to: metabolic syndrome, prediabetes, insulin resistance, obesity, diabetes (Type I and II), anti-psychotic drug-associated obesity, glucocorticoid-induced obesity, hypothalamic obesity associated with craniopharyngioma, and complex and monogenetic disorders associated with obesity. The monogenetic disorders associated with obesity in humans, may include but are not limited to Bardet-Biedl syndrome, and a disorder arising from a mutation in one or more of the following genes ADCY3, ALMS1, ARL6, BBS1, BBS2, BBS4, BBS5, BBS7, BBS9, BBS10, BBS12, BDNF, CCDC28B, CEP290, CREBBP, EP300, GNAS, IER3IP1, MKKS, MKS1, MRAP2, NTRK2, PCSK1, PHF6, POMC, SH2B1, SIM1, TMEM67, TRIM32, TTC8 and VPS13B, or combinations thereof. A metabolic disorder may also be associated with a complex genetic disorder, e.g., Prader-Willi syndrome.

[0124] In exemplary embodiments, treatments provided herein comprising an ActRII antibody in a fixed unit dose of about 25 mg to about 600 mg are useful for the treatment of obesity. In exemplary embodiments, treatments provided herein comprising an ActRII antibody in a fixed unit dose of about 100 mg to about 400 mg are useful for the treatment of obesity. In some exemplary embodiments, treatments provided herein comprising an ActRII antibody in a fixed unit dose of about 300 mg are useful for the treatment of obesity. In other exemplary embodiments, treatments provided herein comprising an ActRII antibody in a fixed unit dose of about 150 mg are useful for the treatment of obesity.

[0125] In some embodiments, treatments comprising ActRII antibody fixed unit doses may be used to treat an obesity-related disorder, including but not limited to: glucose intolerance, prediabetes, Type II diabetes, insulin resistance, high triglycerides, overweight associated physical impairment, osteoporosis, renal disease, obstructive sleep apnea, sexual hormones impairment, endocrine reproductive disorders, osteoarthritis, gastrointestinal cancers, dyslipidaemia, hypertension, heart failure, coronary heart disease, stroke, and/or gallstones.

[0126] Treatments comprising ActRII antibody fixed unit doses may be used to treat a subject who is overweight. In some embodiments, a subject has a BMI of 30 or greater. In some embodiments, a subject has a BMI of 27 or greater. In some embodiments, a subject has a BMI of 27 or greater, and has an obesity related disorder.

[0127] Treatments comprising ActRII antibody fixed unit doses of the disclosure may be used to treat a subject lacking glycemic control.

[0128] Treatments may be administered to subjects of any age, including under 18 years old. In some embodiments, the subject may be over 18 years old, over 30 years old, or over 40 years old. In some embodiments, the subject may be over 50 years old, over 60 years old, or over 80 years old.

[0129] In some embodiments, treatments comprising an ActRII antibody fixed unit doses reduce fat mass in the subject. In some embodiments, an ActRII antibody fixed unit dose reduces fat mass in a subject by at least 5% (e.g., 5%-30%) over the treatment period.

[0130] In some embodiments, treatments comprising ActRII antibody fixed unit doses increase lean mass in the subject. In some embodiments, the fixed unit dose increases lean mass in a subject by at least 1% (e.g., 1%-10%) over the treatment period.

[0131] In some embodiments, treatments comprising ActRII antibody fixed unit doses reduce fat mass and increase lean mass in the subject. In some embodiments, the ActRII antibody fixed unit dose reduces fat mass in a subject by at least 5% (e.g., 5%-30%) and increases lean mass by at least 1% (e.g., 1%-10%) over the treatment period.

[0132] In some embodiments, treatments comprising ActRII antibody fixed unit doses reduce fat mass and maintain lean mass in the subject. In some embodiments, an ActRII antibody fixed unit dose reduces fat mass in a subject by at least 5% (e.g., 5%-30%) and maintains lean mass over the treatment period.

[0133] In some embodiments, treatments comprising ActRII fixed unit doses reduce body weight in the subject. In some embodiments, the ActRII antibody fixed unit dose reduces body weight in a subject by at least 5%, at least 10%, at least 20%, at least 30%, at least 40%, or at least 50% over the treatment period.

[0134] In some embodiments, treatments comprising ActRII fixed unit doses reduce central adiposity in the subject. In some embodiments, the ActRII antibody fixed unit dose reduces central adiposity in a subject by at least 2% (e.g., 2%-20%) over the treatment period.

[0135] In some embodiments, treatments comprising ActRII fixed unit doses reduce liver fat and/or non-liver visceral fat in the subject. In some embodiments, the ActRII antibody fixed unit dose reduces central adiposity in a subject by at least 2% (e.g., 2%-20%) over the treatment period as assessed by magnetic resonance imaging (MRI).

[0136] In some embodiments, fat mass in response to an ActRII fixed unit dose is measured with bioelectrical impedance analysis (BIA), dual X-ray absorptiometry (DXA), magnetic resonance imaging (MRI), and/or waist circumference.

[0137] In some embodiments, treatments comprising ActRII fixed unit doses improves glycemic control in the subject.

[0138] In some embodiments, glycemic control in response to an ActRII fixed unit dose is measured by glucose and insulin levels, and the HOMA2 model is applied (www.dtu.ox.ac.uk/homacalculator/).

[0139] In some embodiments, the “Ctrough” or minimum serum concentration of an ActRII antibody in a subject may be measured to determine the efficacy of a treatment. In some embodiments, the efficacy of the treatment is assessed as a serum concentration of about 500%, about 400%, about 300%, about 200%, about 100%, about 90%, about 80%, or about 75% of the desired “Ctrough”. In some embodiments, a desired “Ctrough” is about 1 μg/ml to about 10 μg/ml. In some embodiments, a desired “Ctrough” is about 3 μg/ml to about 30 μg/ml. In some embodiments, a desired “Ctrough” is about 2.5 μg/ml, about 5 μg/ml, about 10 μg/ml, about 15 μg/ml, about 20 μg/ml, about 25 μg/ml, about 30 μg/ml, or about 35 μg/ml.

[0140] In some embodiments, the efficacy of an ActRII fixed unit dose is determined by about 100%, about 90%, about 80%, about 75%, about 50%, or about 25% improvement in at least one of the following measurements: body weight; bioelectrical impedance analysis (BIA) measurement of lean mass and/or fat mass; waist to hip ratio; waist to height ratio; dual X-ray absorptiometry (DXA) measurement of lean mass and/or fat mass; magnetic resonance imaging (MRI) measurement of lean mass and/or fat mass; waist circumference; decreased BMI; blood lipids profile; leptin, lectin, adiponectin, and adipsin levels; IL-8 and/or IL-6 levels; urine biomarkers; hemoglobin A1c (HgbA1c) levels; hand dynamometry demonstrating muscle strength; glucose levels; insulin levels; short physical performance battery (SPPB); Impact of Weight on Quality of Life (IWQoL-Lite for CT) assessment; Short Form (36) Health Survey (SF-36) assessment; the homeostasis model assessment 2 (HOMA2); and physical activity monitoring via actigraphy.

### Combination Therapies

[0141] In some embodiments, the ActRII antibody pharmaceutical compositions are administered as part of a combination therapy with an incretin agonist or another hormone agonist. The incretin agonist or other hormone agonist may be administered as part of the same or a separate formulation from the ActRII antibody, and may be administered at the same time or a different time than the ActRII antibody.

[0142] Incretin agonists suitable for a combination therapy with an ActRII antibody include but are not limited to: exenatide, exenatide extended-release, dulaglutide, liraglutide, lixisenatide, semaglutide, tirzepatide, cotadutide, noiiglutide, oxyntomodulin (e.g., mazdutide), retatrutide, albiglutide, beinaglutide, PEG-loxenatide, pemvidutide, and danuglipron (as described in WO 2023/028606, incorporated herein by reference in its entirety). Other hormone agonists suitable for combination therapy with an ActRII antibody include but are not limited to long-acting amylin receptor agonists, e.g., cagrilintide, dual amylin calcitonin receptor agonists (DACRAs), and Peptide YY agonists.

[0143] In some embodiments, the incretin agonist or other hormone agonist dose is administered weekly in a dose of about 0.25 mg from about week 0 to about week 4, in a dose of about 0.5 mg from about week 5 to about week 8, in a dose of about 1.0 mg from about week 8 to about week 12, in a dose of about 1.7 mg from about week 12 to about week 15, in a dose of about 2.4 mg from about week 16 to about week 20, and a dose of about 2.4 mg from about week 20 and thereafter. In some embodiments, the incretin agonist or other hormone agonist dose is administered weekly in a dose of about 5.0 mg, about 10 mg, or about 15 mg.

[0144] In some embodiments, the ActRII antibody and the incretin agonist or other hormone agonist are both administered subcutaneously, according to any of the above doses.

[0145] In some embodiments, the ActRII antibody is administered prior to the incretin agonist or other hormone agonist. In some embodiments, the ActRII antibody is administered at least 12 weeks prior, at least 10 weeks prior, at least 8 weeks prior, at least 6 weeks prior, at least 4 weeks prior, at least 2 weeks prior, at least 1 week prior, at least 1 day prior, or at least 1 hour prior to the administration of the incretin agonist or other hormone agonist.

[0146] In some embodiments, the incretin agonist or other hormone agonist is administered prior to the ActRII antibody. In some embodiments, the incretin agonist or other hormone agonist is administered at least 2 weeks prior, at least 1 week prior, at least 5 days prior, at least 4 days prior, at least 2 days prior, at least 1 day prior, at least 6 hours prior, or at least 1 hour prior to the ActRII antibody.

[0147] In some embodiments, the ActRII antibody and the incretin agonist or other hormone agonist are administered without regard for the order of administration.

[0148] In some embodiments, the ActRII antibody and the incretin agonist or other hormone agonist are administered at essentially the same time. In some embodiments, the ActRII antibody and the incretin agonist or other hormone agonist are administered in the same formulation.

### IV. Pharmaceutical Compositions

[0149] The compositions provided herein comprising ActRII antibody fixed unit doses are configured for subcutaneous administration. In exemplary embodiments, the compositions are formulated as pharmaceutical compositions including an ActRII antibody comprising the sequence of SEQ ID NOS: 1-6 and/or SEQ ID NOS: 7 and 8. In some exemplary embodiments, the compositions are formulated as pharmaceutical compositions including an ActRII antibody comprising the sequence of SEQ ID NO: 7 or a sequence with at least 80%, 81%, 82%, 83%, 84%, 85%, 86%, 87%, 88%, 89%, 90%, 91%, 92%, 93%, 94%, 95%, 96%, 97%, 98%, or 99% sequence identity thereto, and/or the sequence of SEQ ID NO: 8 or a sequence with at least 80%, 81%, 82%, 83%, 84%, 85%, 86%, 87%, 88%, 89%, 90%, 91%, 92%, 93%, 94%, 95%, 96%, 97%, 98%, or 99% sequence identity thereto.

[0150] In some embodiments the pharmaceutical composition includes an excipient, or carrier, e.g., an aqueous carrier. A variety of aqueous carriers can be used, e.g., buffered saline. The pharmaceutical compositions may contain pharmaceutically acceptable auxiliary substances as those required to approximate physiological conditions such as pH and buffering agents, toxicity countering agents, e.g., disodium phosphate dihydrate, monosodium phosphate, sodium acetate, sodium chloride, potassium chloride, calcium chloride, hydrochloric acid, sodium hydroxide, L-histidine, L-histidine hydrochloride, and sodium lactate. The concentration of active agent in these formulations can vary and are selected based on fluid volumes, viscosities, and body weight in accordance with the particular mode of administration selected and the patient's needs (e.g., Remington's Pharmaceutical Science (15th ed., 1980) and Goodman & Gillman, The Pharmacological Basis of Therapeutics (Hardman et al., eds., 1996)). The pharmaceutical compositions may contain pharmaceutically acceptable auxiliary substances such as those that contribute to the stability and activity of the pharmacologically active agent or agents, including but not limited to trehalose, sucrose, or other sugars and polysorbate 20, polysorbate 60, polysorbate 80 or other emulsifiers or stabilizers.

### Coformulations

[0151] In some embodiments, the ActRII antibody pharmaceutical compositions are co-formulated with an incretin agonist or another hormone agonist. Incretin agonists suitable for co-formulation include but are not limited to: exenatide, exenatide extended-release, dulaglutide, liraglutide, lixisenatide, semaglutide, tirzepatide, cotadutide, noiiglutide, oxyntomodulin (e.g., mazdutide), retatrutide, albiglutide, beinaglutide, PEG-loxenatide, pemvidutide, and danuglipron (as described in WO 2023/028606, incorporated herein by reference in its entirety). In some embodiments, the incretin agonist is present in the pharmaceutical composition with an ActRII antibody in a dose of about 0.005 mg to about 3.0 mg. In some embodiments, the incretin agonist is present in the pharmaceutical composition with an ActRII antibody in a dose of about 0.05 mg to about 2.0 mg. In some embodiments, the incretin agonist is present in the pharmaceutical composition with an ActRII antibody in a dose of about 0.5 mg to about 1.0 mg. In some embodiments, the concentration of the incretin agonist may vary or increase incrementally during the treatment.

[0152] In some embodiments, an incretin agonist is present in the pharmaceutical composition in a dose of about 0.005 mg to about 3.0 mg and the ActRII antibody is present in a dose of about 25 mg to about 600 mg. In some embodiments, an incretin agonist is present in the pharmaceutical composition in a dose of about 0.005 mg to about 3.0 mg and the ActRII antibody is present in a dose of about 100 mg to about 400 mg. In some embodiments, an incretin agonist is present in the pharmaceutical composition in a dose of about 0.005 mg to about 3.0 mg and the ActRII antibody is present in a dose of about 300 mg. In some embodiments, an incretin agonist is present in the pharmaceutical composition in a dose of about 0.005 mg to about 3.0 mg and the ActRII antibody is present in a dose of about 150 mg.

[0153] Other hormone agonists suitable for co-formulation with an ActRII antibody in the pharmaceutical composition include but are not limited to long-acting amylin receptor agonists, e.g., cagrilintide, dual amylin calcitonin receptor agonists (DACRAs), and Peptide YY agonists.

### EXAMPLES

### Example 1: Methods of Clinical Study to Evaluate Subcutaneous Dosing of an ActRII Antibody

[0154] The purpose of this study was to assess the pharmacokinetic (PK) and pharmacodynamic (PD) effects of subcutaneous (s.c.) dosing of bimagrumab, an ActRII antibody. The pharmacodynamic effects of interest in this study were fat mass and lean mass.

### Primary Objectives

[0155] 1. To evaluate the safety and tolerability of different s.c. dosing of bimagrumab.
[0156] 2. To determine the local tolerability of s.c. administration of bimagrumab
[0157] 3. To evaluate the pharmacokinetics of different s.c. relative to intravenous (i.v.) dosing of bimagrumab

### Endpoints for Primary Objectives

[0158] 1. Physical exam/body weight
[0159] 2. Vital signs
[0160] 3. ECG
[0161] 4. Safety laboratories
[0162] 5. Adverse events (AEs)/Serious adverse events SAEs)
[0163] 6. Pain assessment by visual analog scale (VAS)
[0164] 7. Investigator's assessment for tenderness, erythema/redness, induration/swelling
[0165] 8. PK (sampling of full profiles after first and last dose and pre-dose during treatment)
[0166] 9. Basic PK parameters: Cmax, Tmax, Cmin, AUCtau, AUClast (after the last dose only), Race

### Secondary Objective

[0167] To determine the absolute bioavailability of bimagrumab given by s.c. administration.

### Endpoints for Secondary Objective

[0168] The absolute bioavailability was determined by modeling, as bimagrumab exhibited target mediated drug disposition (TMDD), in which a drug binds with such high affinity to its pharmacological target that this affects its pharmacokinetic characteristics.

### Exploratory Objective

[0169] To explore the pharmacodynamics and the PK/PD relationship of different s.c. and i.v. dose regimens of bimagrumab.

### Endpoints for Exploratory Objective

[0170] Pharmacokinetics (PK): full PK profiles after first and last dose and pre-dose during treatment and trough samples before each dose. Pharmacodynamics: lean body mass (LBM), including appendicular LBM, by dual energy X-ray absorptiometry (DXA) before and during the treatment and at the end of follow-up period.

### Study Design

[0171] This was an exploratory, randomized, placebo-controlled, multiple-dose study in elderly healthy male and female subjects age 70 years and older. It was designed with a total of 7 treatment groups who received either active or placebo in a parallel group-comparison design, see FIG. 1.

[0172] This study was designed to combine the evaluation of safety/tolerability and the pharmacokinetic and pharmacodynamic characteristics of multiple doses of bimagrumab given as different s.c. or i.v. regimens every 4 weeks, as well as more frequent weekly s.c. dosing regimens. The s.c. dosing every 4 weeks was administered with an infusion pump.

[0173] A total of 91 male or female elderly subjects with stable health and medication use were enrolled in the study and randomized. Overall, demographic characteristics were generally balanced between different dose groups (see FIGS. 2 and 3). The mean (SD) age of the subjects was 74.5 (4.25) years, height was 164.12 (9.70) cm, weight was 75.77 (14.81) kg and BMI was 27.95 (3.75) kg/m². The subject population involved was predominantly Caucasian (89%), with a high proportion of Hispanic/Latino (28.6%). Of the 91 subjects enrolled, 49 were female.

### Treatment Arms

[0174] Subjects were assigned to one of the following treatment arms:
[0175] Intravenous infusion (cohorts 1 & 2) 8 active+2 placebo per cohort; n=20:
   [0176] 700 mg by i.v. infusion over 30 min, given every 4 weeks at Week 0, 4, 8. Total dose given over the study: 700 mg×3=2100 mg
   [0177] 210 mg by i.v. infusion over 30 min, given every 4 weeks at Week 0, 4, 8. Total dose given over the study: 210 mg×3=630 mg
[0178] High and mid volume s.c. (cohorts 3 & 4) 12 active+2 placebo each per cohort; n=28:
   [0179] 1500 mg (10 mL) by s.c. infusion over 30 min, given every 4 weeks at Week 0, 4, 8. Total dose given over the study: 1500 mg×3=4500 mg
   [0180] 525 mg (3.5 mL) by s.c. infusion over 10 min, given every 4 weeks at Week 0, 4, 8. Total dose given over the study: 525 mg×3=1575 mg
[0181] Low volume s.c. (cohorts 5, 6 & 7) 12 active+2 placebo per cohort; n=43:
   [0182] 300 mg (2 mL) by s.c. injection (bolus), given every week up to Week 11. Total dose given over the study: 300×12=3600 mg
   [0183] 150 mg (1 mL) by s.c. injection (bolus), given every week up to Week 11. Total dose given over the study: 150×12=1800 mg
   [0184] 52.5 mg (0.35 mL) by s.c. injection (bolus), given every week up to Week 11. Total dose given over the study: 52.5×12=630 mg

### Pharmacodynamic Assessments

[0185] Dual energy X-ray absorptiometry (DXA) was used to assess changes in body composition, including total lean body mass (LBM) and fat body mass (FBM) and appendicular skeletal mass index (ASMI). DXA instruments use an X-ray source that generates and is split into two wavelengths to measure bone mineral mass and soft tissue, from which fat and fat-free mass (or lean body mass) were estimated.

### Safety Assessments

[0186] Safety assessments consisted of collecting all adverse events (AEs) and serious adverse events (SAEs). The regular monitoring of hematology, blood chemistry and urine was performed at the study center, and regular assessments were done of vital signs, physical condition and body weight and ECG. Local tolerability assessment was also performed and immunogenicity (IG) samples were collected.

### Pharmacokinetic Assessments

[0187] Pharmacokinetic (PK) samples were obtained and evaluated in all subjects at all dose levels using a validated bridging enzyme-linked immunosorbent assay (ELISA) method, the anticipated Lower Limit of Quantification (LLOQ) was 0.176 μg/mL. The linear trapezoidal rule was used for AUC calculation. As bimagrumab exhibits a non-linear PK profile, also known as TMDD, AUC_{inf}, half-life (T½) and Clearance (CL) and Volume of distribution (V) were not derived using noncompartmental analysis (NCA). The accumulation ratio (R_{acc}) was calculated using AUCₜₐᵤ values obtained from a dosing interval after the first and last dose as [(AUCₜₐᵤ, last dose)/(AUCₜₐᵤ, first dose)]. As bimagrumab exhibits non-linear PK profile, with CL dependent on bimagrumab concentrations, the AUC cannot be used to infer absolute bioavailability and dose proportionality. Therefore, a model-based approach was used to characterize the subcutaneous bioavailability

### Example 2: Pharmacokinetic Results of Clinical Study to Evaluate Subcutaneous Dosing of an ActRII Antibody

[0188] Notably, the 300 mg subcutaneous bolus dose exhibited no detectable TMDD effect, indicating that for this method of administration, a 300 mg dose was high enough to maintain saturation of the clearance. As demonstrated in FIG. 8, a 300 mg subcutaneous (s.c.) bolus dose of an ActRII antibody is predicted to maintain serum concentration above 10 μg/ml at a relatively steady level from about day 15 to about day 85. Similarly, a 150 mg subcutaneous bolus dose of an ActRII antibody is predicted to maintain serum concentration at about 10 μg/ml from about day 29 to about day 85.

### Intravenous

[0189] Cohorts 1 and 2 (i.v. infusion): As expected, a TMDD was observed on the concentration-time profiles. The variability was moderate with around 30-40% coefficient of variability (CV; range 17 to 47% CV). The accumulation ratio, based on AUCtau, was relatively low (range of 1.15 to 1.37), but it could be observed from the Cmin that the steady state might not have been reached with three monthly administrations. As expected with i.v. administration, the peak-to-trough ratio was relatively large.

### Subcutaneous

[0190] Cohorts 3 and 4 (s.c. infusion): The absorption of bimagrumab following s.c. infusion was relatively slow (Tmax around one week post-dose). The TMDD profile was observed only at the lower dose (525 mg) (FIG. 7). The variability was moderate (with a range of 29 to 39% CV). The accumulation ratio, based on AUCtau, was slightly higher than with i.v. infusion (between 1.72 and 1.92), but it could be also observed from the Cmin that the steady state might not have been reached with three monthly administrations. The peak-to-trough ratio was moderate.

[0191] Cohorts 5, 6 and 7 (s.c. bolus): The absorption of bimagrumab following the s.c. bolus was faster at low doses following the first dose (FIG. 8). The concentration-time profiles were relatively flat after the final dose with a low peak-to-trough ratio. The variability of PK parameters was relatively high with a CV around 50% for 300 mg and 150 mg and around 100% for 52.5 mg. The accumulation ratio, based on AUCtau, was much higher than in the i.v. and s.c. infusion groups. For most of the subjects, the steady state, based on Cmin, was reached after 9 weekly doses (Day 57). Notably, the TMDD profile could be observed at the low doses (i.e. 52.5 mg and 150 mg) but not at 300 mg, demonstrating that for a 300 mg subcutaneous bolus, the concentration was high enough to maintain saturation of the clearance.

### Example 3: Pharmacodynamic Results of Clinical Study to Evaluate Subcutaneous Dosing of an ActRII Antibody

[0192] Administration via intravenous and subcutaneous (both bolus and infusion) showed similar effects on lean body mass increase and fat body mass decrease.

### LBM and Appendicular LBM

[0193] A dose-dependent plateau effect with respect to lean mass increase, of the order of 1.5-2 kg (i.e. an increase of ˜4-6% from baseline) at maximal doses was observed at the end of each treatment period (Day 85), whether bimagrumab was administered i.v. or s.c. (bolus and infusion).

### FBM

[0194] A dose-dependent linear decrease in whole-body fat mass, up to ˜2 to 3 kg at maximal doses, was observed at the end of each treatment period (Day 85), whether bimagrumab was administered i.v. or s.c. (bolus and infusion). For the highest doses, during the follow-up treatment period, this loss of fat further increased to ˜3 to 4 kg in the i.v. and s.c. infusion groups and was maintained in the highest dose s.c. infusion group.

### Example 4: Model Predictions of Subcutaneous Dosing of an ActRII Antibody

[0195] Computational models of the ActRII antibody bimagrumab effects on PK and PD were developed based on the above clinical studies (Examples 1-3). The model predicts full ActRII receptor occupancy (RO) (FIG. 19) with an ActRII serum concentration of about 10 μg/ml for most subjects.

[0196] The effects of loading doses were modeled in order to predict the number of subjects across a range of body weights with an ActRII serum concentration above the RO of 10 μg/ml, and to predict the time required to reach this concentration.

[0197] FIG. 20 shows the predicted time to reach various bimagrumab concentrations in a population of 2500 subjects, each weighing 100 kg, in which 300 mg bimagrumab is administered weekly and subcutaneously without a loading dose. The threshold levels of 5 μg/ml and 10 μg/ml are indicated in the graph and in the table below. FIG. 21 shows the predicted time to reach various bimagrumab concentrations in a population of 2500 subjects, of weights from 60 to 140 kg.

[0198] FIG. 22 shows the predicted bimagrumab concentration over time in a population of subjects, of weights from 50 to 200 kg, in which 300 mg bimagrumab is administered weekly and subcutaneously without a loading dose on day 1. FIG. 23 shows the predicted timing of change in total fat body mass in a population of subjects, of weights from 50 to 200 kg, in which 300 mg bimagrumab is administered weekly and subcutaneously without a loading dose on day 1.

[0199] FIG. 24 shows the predicted bimagrumab concentration over time in a population of subjects, of weights from 50 to 200 kg, in which 300 mg bimagrumab is administered weekly and subcutaneously with two doses (i.e., with one loading dose) of 300 mg bimagrumab administered subcutaneously on day 1. Notably, the time to reach a median serum concentration of 10 μg/ml for all subjects was decreased with a loading dose on day 1. FIG. 25 shows the timing of change in total fat body mass in a population of subjects, of weights from 50 to 200 kg, in which 300 mg bimagrumab is administered weekly and subcutaneously with two doses (i.e., with one loading dose) of 300 mg bimagrumab administered subcutaneously on day 1.

[0200] FIG. 26 shows the bimagrumab concentration over time in a population of subjects, of weights from 50 to 200 kg, in which 300 mg bimagrumab is administered weekly and subcutaneously with three doses (i.e., with two loading doses) of 300 mg bimagrumab administered subcutaneously on day 1. FIG. 27 shows the timing of change in total fat body mass in a population of subjects, of weights from 50 to 200 kg, in which 300 mg bimagrumab is administered weekly and subcutaneously with three doses (i.e., with two loading doses) of 300 mg bimagrumab administered subcutaneously on day 1.

[0201] FIG. 28 shows a comparison of the effect of loading doses (0, 1, or 2 loading doses) on bimagrumab exposure in a population of subjects weighing 100 kg in which in which 300 mg bimagrumab is administered weekly and subcutaneously. FIG. 29 shows a comparison of the effect of loading doses (0, 1, or 2 loading doses) for a population of subjects with a weight of 100 kg in which in which 300 mg bimagrumab is administered weekly and subcutaneously.

[0202] FIG. 30 and FIG. 31 show that increasing bimagrumab dose to 600 mg has little effect on the timing of exposure.

### Population Modeling Including Individual Variability

[0203] The models described herein predict that 300 mg administered weekly and subcutaneously, without a loading dose, is sufficient to reach a serum concentration of at least 10 μg/ml for most subjects. However, when individual response variability within the population is taken into account, as shown in FIG. 32, the concentration of bimagrumab required to have the maximal effect on fat body mass and lean body mass in a population increases to about 10-30 μg/ml. As shown in FIG. 33, in a model in which individual response variability within the population is taken into account, subjects with higher body weights do not reach 10 μg/ml with 300 mg administered weekly and subcutaneously, and a loading dose is required.

1.-78. (canceled)

79. A pharmaceutical composition comprising an ActRII antibody, wherein the ActRII antibody is present at about 25 mg to about 600 mg per fixed unit dose, and wherein the composition is configured for subcutaneous administration.

80. The pharmaceutical composition of claim 79, wherein the ActRII antibody is present at about 100 to about 400 mg per fixed unit dose.

81. The pharmaceutical composition of claim 80, wherein the ActRII antibody is present at about 150 mg per fixed unit dose.

82. The pharmaceutical composition of claim 80, wherein the ActRII antibody is present at about 300 mg per fixed unit dose.

83. The pharmaceutical composition of claim 79, wherein the ActRII antibody comprises the CDR amino acid sequences of SEQ ID NOS: 1-6.

84. The pharmaceutical composition of claim 83, wherein the ActRII antibody comprises: the VH amino acid sequence of SEQ ID NO: 7, or a sequence with at least 80% sequence identity thereto, and the VL amino acid sequence of SEQ ID NO: 8, or a sequence with at least 80% sequence identity thereto.

85. The pharmaceutical composition of claim 84, wherein the ActRII antibody comprises: the amino acid sequence of SEQ ID NO: 9, or a sequence with at least 80% sequence identity thereto, and the amino acid sequence of SEQ ID NO: 10, or a sequence with at least 80% sequence identity thereto.

86. The pharmaceutical composition of claim 85, wherein the pharmaceutical composition comprises an incretin agonist.

87. The pharmaceutical composition of claim 86, wherein the incretin agonist is selected from the group consisting of exenatide, exenatide extended-release, dulaglutide, liraglutide, lixisenatide, semaglutide, tirzepatide, cotadutide, noiiglutide, oxyntomodulin, retatrutide, albiglutide, beinaglutide, PEG-loxenatide, pemvidutide, and danuglipron.

88. A method of treating a metabolic disease in a subject in need thereof, comprising subcutaneously administering to the subject at about 25 mg to about 600 mg fixed unit dose of an ActRII antibody.

89. The method of claim 88, wherein the ActRII antibody is present in at about 100 mg to about 400 mg per fixed unit dose.

90. The method of claim 89, wherein the ActRII antibody is present at about 150 mg per fixed unit dose.

91. The method of claim 89, wherein the ActRII antibody is present at about 300 mg per fixed unit dose.

92. The method of claim 88, wherein the disease is a metabolic disease is selected from the group consisting of: obesity, diabetes, metabolic syndrome, anti-psychotic drug-associated obesity, glucocorticoid-induced obesity, hypothalamic obesity associated with craniopharyngioma, and a monogenetic disorder associated with obesity.

93. The method of claim 88, wherein the disease is a muscle wasting disease or sarcopenia.

94. The method of claim 88, wherein the subject has an obesity disorder.

95. The method of claim 88, wherein the ActRII antibody comprises the CDR amino acid sequences of SEQ ID NOS: 1-6.

96. The method of claim 88, wherein the ActRII antibody comprises: the VH amino acid sequence of SEQ ID NO: 7, or a sequence with at least 80% sequence identity thereto, and the VL amino acid sequence of SEQ ID NO: 8, or a sequence with at least 80% sequence identity thereto.

97. The method of claim 96, wherein the ActRII antibody comprises: the HC amino acid sequence of SEQ ID NO: 9, or a sequence with at least 80% sequence identity thereto, and the LC amino acid sequence of SEQ ID NO: 10, or a sequence with at least 80% sequence identity thereto.

98. The method of claim 97, wherein the fixed unit dose of an ActRII antibody is administered as a part of a combination therapy with an incretin agonist.

99. The method of claim 98, wherein the incretin agonist is selected from exenatide, exenatide extended-release, dulaglutide, liraglutide, lixisenatide, semaglutide, tirzepatide, cotadutide, noiiglutide, oxyntomodulin, retatrutide, albiglutide, beinaglutide, PEG-loxenatide, pemvidutide, and danuglipron.

100. The method of claim 98, wherein the ActRII antibody is co-formulated with an incretin agonist.

The application's sequence listing, which the Patent Office published only in electronic form, follows.

SEQUENCE LISTING (5049 sequences)

SEQ ID NO: 1 - protein, 10 aa, synthetic construct
GYTFTSSYIN

SEQ ID NO: 2 - protein, 16 aa, synthetic construct
TINPVSGSTSYAQKFQ

SEQ ID NO: 3 - protein, 6 aa, synthetic construct
GGWFDY

SEQ ID NO: 4 - protein, 14 aa, synthetic construct
TGTSSDVGSYNYVN

SEQ ID NO: 5 - protein, 10 aa, synthetic construct
MIYGVSKRPS

SEQ ID NO: 6 - protein, 10 aa, synthetic construct
GTFAGGSYYG

SEQ ID NO: 7 - protein, 115 aa, synthetic construct [sequence omitted]

SEQ ID NO: 8 - protein, 113 aa, synthetic construct
QSALTQPASVSGSPGQSITISCTGTSSDVGSYNYVNWYQQHPGKAPKLMIYGVSKRPSGVSNRFSGSKSGNTASLTISGLQAEDEADYYCGTFAGGSYYGVFGGGTKLTVLGQ

SEQ ID NO: 9 - protein, 445 aa, synthetic construct
QVQLVQSGAEVKKPGASVKVSCKASGYTFTSSYINWVRQAPGQGLEWMGTINPVSGSTSYAQKFQGRVTMTRDTSISTAYMELSRLRSDDTAVYYCARGGWFDYWGQGTLVTVSSASTKGPSVFPLAPSSKSTSGGTAALGCLVKDYFPEPVTVSWNSGALTSGVHTFPAVLQSSGLYSLSSVVTVPSSSLGTQTYICNVNHKPSNTKVDKRVEPKSCDKTHTCPPCPAPEAAGGPSVFLFPPKPKDTLMISRTPEVTCVVVDVSHEDPEVKFNWYVDGVEVHNAKTKPREEQYNSTYRVVSVLTVLHQDWLNGKEYKCKVSNKALPAPIEKTISKAKGQPREPQVYTLPPSREEMTKNQVSLTCLVKGFYPSDIAVEWESNGQPENNYKTTPPVLDSDGSFFLYSKLTVDKSRWQQGNVFSCSVMHEALHNHYTQKSLSLSPGK

SEQ ID NO: 10 - protein, 217 aa, synthetic construct
QSALTQPASVSGSPGQSITISCTGTSSDVGSYNYVNWYQQHPGKAPKLMIYGVSKRPSGVSNRFSGSKSGNTASLTISGLQAEDEADYYCGTFAGGSYYGVFGGGTKLTVLGQPKAAPSVTLFPPSSEELQANKATLVCLISDFYPGAVTVAWKADSSPVKAGVETTTPSKQSNNKYAASSYLSLTPEQWKSHRSYSCQVTHEGSTVEKTVAPTECS

SEQ ID NO: 11 - protein, 9 aa, Homo sapiens
GGSISSSSY

SEQ ID NO: 12 - protein, 5 aa, Homo sapiens
YYSGS

SEQ ID NO: 13 - protein, 20 aa, Homo sapiens
DSGIGYSYASSHGYYYYMDV

SEQ ID NO: 14 - protein, 11 aa, Homo sapiens
RASQSVGSNLA

SEQ ID NO: 15 - protein, 7 aa, Homo sapiens
GASTRAT

SEQ ID NO: 16 - protein, 9 aa, Homo sapiens
QQYFHFPLT

SEQ ID NO: 17 - protein, 9 aa, Homo sapiens
GGSIGSGGY

SEQ ID NO: 18 - protein, 4 aa, Homo sapiens
YGSG

SEQ ID NO: 19 - protein, 9 aa, Homo sapiens
GGSIKSGGY

SEQ ID NO: 20 - protein, 13 aa, Homo sapiens
WIGGIYPSGSTYY

SEQ ID NO: 21 - protein, 9 aa, Homo sapiens
GGSILSGGY

SEQ ID NO: 22 - protein, 5 aa, Homo sapiens
YYSGK

SEQ ID NO: 23 - protein, 9 aa, Homo sapiens
GGSISSGGY

SEQ ID NO: 24 - protein, 6 aa, Homo sapiens
YYSGRT

SEQ ID NO: 25 - protein, 9 aa, Homo sapiens
GGSIESGGY

SEQ ID NO: 26 - protein, 11 aa, Homo sapiens
AGKYRWHGMDV

SEQ ID NO: 27 - protein, 11 aa, Homo sapiens
RASQGISSWLA

SEQ ID NO: 28 - protein, 7 aa, Homo sapiens
AASNLQS

SEQ ID NO: 29 - protein, 9 aa, Homo sapiens
QQAPDLPIT

SEQ ID NO: 30 - protein, 8 aa, Homo sapiens
GYSISSGV

SEQ ID NO: 31 - protein, 5 aa, Homo sapiens
VHSGH

SEQ ID NO: 32 - protein, 7 aa, Homo sapiens
GFTFSSY

SEQ ID NO: 33 - protein, 6 aa, Homo sapiens
SGSGGS

SEQ ID NO: 34 - protein, 12 aa, Homo sapiens
DPLSLLLGYFDY

SEQ ID NO: 35 - protein, 11 aa, Homo sapiens
RASQSISSWLA

SEQ ID NO: 36 - protein, 7 aa, Homo sapiens
DASSLES

SEQ ID NO: 37 - protein, 9 aa, Homo sapiens
QQYNRHSPT

SEQ ID NO: 38 - protein, 7 aa, Homo sapiens
GFTFSRY

SEQ ID NO: 39 - protein, 6 aa, Homo sapiens
SGSGGA

SEQ ID NO: 40 - protein, 12 aa, Homo sapiens
DPLSLLLGYFDY

SEQ ID NO: 41 - protein, 7 aa, Homo sapiens
GYTFTSY

SEQ ID NO: 42 - protein, 6 aa, Homo sapiens
SPYNGN

SEQ ID NO: 43 - protein, 11 aa, Homo sapiens
VSMYAPEPMDV

SEQ ID NO: 44 - protein, 11 aa, Homo sapiens
RASQGISRWLA

SEQ ID NO: 45 - protein, 6 aa, Homo sapiens
ASSLQS

SEQ ID NO: 46 - protein, 9 aa, Homo sapiens
QQAFSHPWT

SEQ ID NO: 47 - protein, 10 aa, Homo sapiens
GYTFTGHKMH

SEQ ID NO: 48 - protein, 6 aa, Homo sapiens
NPASGW

SEQ ID NO: 49 - protein, 11 aa, Homo sapiens
VSMYAPEPMDV

SEQ ID NO: 50 - protein, 7 aa, Homo sapiens
GYTFTSY

SEQ ID NO: 51 - protein, 6 aa, Homo sapiens
RPSVGS

SEQ ID NO: 52 - protein, 11 aa, Homo sapiens
VSMYAPEPMDV

SEQ ID NO: 53 - protein, 7 aa, Homo sapiens
GYTFTSY

SEQ ID NO: 54 - protein, 6 aa, Homo sapiens
VPSGGS

SEQ ID NO: 55 - protein, 11 aa, Homo sapiens
VSMYAPEPMDV

SEQ ID NO: 56 - protein, 6 aa, Homo sapiens
VPSGGS

SEQ ID NO: 57 - protein, 11 aa, Homo sapiens
VSRYAPEPMDV

SEQ ID NO: 58 - protein, 9 aa, Homo sapiens
GGSISSGSY

SEQ ID NO: 59 - protein, 5 aa, Homo sapiens
YYSGS

SEQ ID NO: 60 - protein, 12 aa, Homo sapiens
GLGMYYHVPFDI

SEQ ID NO: 61 - protein, 11 aa, Homo sapiens
RASQSVSSYLA

SEQ ID NO: 62 - protein, 7 aa, Homo sapiens
DASNRAT

SEQ ID NO: 63 - protein, 9 aa, Homo sapiens
QQYFHWPPT

SEQ ID NO: 64 - protein, 5 aa, synthetic construct
  REGION 1..5: note = CDR1 amino acid residues 31-35 of SEQ ID NO 144
SYGMT

SEQ ID NO: 65 - protein, 17 aa, synthetic construct
  REGION 1..17: note = CDR2 amino acid residues 50-65 of SEQ ID NO 144
VISGSGGGTYYADSVKG

SEQ ID NO: 66 - protein, 9 aa, synthetic construct
  REGION 1..9: note = CDR3 amino acid residues 95-102 of SEQ ID NO 144
GPRIVGMDV

SEQ ID NO: 67 - protein, 11 aa, synthetic construct
  REGION 1..11: note = CDR1 amino acid residues 24-34 of SEQ ID NO 151
RASQGISSWLA

SEQ ID NO: 68 - protein, 7 aa, synthetic construct
  REGION 1..7: note = CDR2 amino acid residues 50-56 of SEQ ID NO 151
AASSLQS

SEQ ID NO: 69 - protein, 9 aa, synthetic construct
  REGION 1..9: note = CDR3 amino acid residues 89-97 of SEQ ID NO 151
QQVFSYPLT

SEQ ID NO: 70 - protein, 5 aa, synthetic construct
  REGION 1..5: note = CDR1 amino acid residues 31-35 of SEQ ID NO 165
SYRMH

SEQ ID NO: 71 - protein, 17 aa, synthetic construct
  REGION 1..17: note = CDR2 amino acid residues 50-66 of SEQ ID NO 165
FIVPSGGSTGYAQKFQG

SEQ ID NO: 72 - protein, 11 aa, synthetic construct
  REGION 1..11: note = CDR3 amino acid residues 99-109 of SEQ ID NO 165
VSRYAPEPMDV

SEQ ID NO: 73 - protein, 11 aa, synthetic construct
  REGION 1..11: note = CDR1 amino acid residues 24-34 of SEQ ID NO 172
RASQGISRWLA

SEQ ID NO: 74 - protein, 7 aa, synthetic construct
  REGION 1..7: note = CDR2 amino acid residues 50-56 of SEQ ID NO 172
AASSLQS

SEQ ID NO: 75 - protein, 9 aa, synthetic construct
  REGION 1..9: note = CDR3 amino acid residues 89-97 of SEQ ID NO 172
QQAFSHPWT

SEQ ID NO: 76 - protein, 10 aa, synthetic construct
YSITSGYYWN

SEQ ID NO: 77 - protein, 16 aa, synthetic construct
YISYDGSNNYNPSLIN

SEQ ID NO: 78 - protein, 11 aa, synthetic construct
YAYRNDVRFAY

SEQ ID NO: 79 - protein, 11 aa, synthetic construct
RASQDISNFLN

SEQ ID NO: 80 - protein, 7 aa, synthetic construct
FTSRLHS

SEQ ID NO: 81 - protein, 9 aa, synthetic construct
QQGNTLPWT

SEQ ID NO: 82 - protein, 6 aa, synthetic construct
SSYGMH

SEQ ID NO: 83 - protein, 6 aa, synthetic construct
DDYSMH

SEQ ID NO: 84 - protein, 6 aa, synthetic construct
SSYGMH

SEQ ID NO: 85 - protein, 6 aa, synthetic construct
SDYGMH

SEQ ID NO: 86 - protein, 6 aa, synthetic construct
SDYGMH

SEQ ID NO: 87 - protein, 6 aa, synthetic construct
DSYGMH

SEQ ID NO: 88 - protein, 6 aa, synthetic construct
DSYSMN

SEQ ID NO: 89 - protein, 6 aa, synthetic construct
DSYGMH

SEQ ID NO: 90 - protein, 6 aa, synthetic construct
SSYGMH

SEQ ID NO: 91 - protein, 6 aa, synthetic construct
DSYGMN

SEQ ID NO: 92 - protein, 6 aa, synthetic construct
SSYGMN

SEQ ID NO: 93 - protein, 6 aa, synthetic construct
SSYGMH

SEQ ID NO: 94 - protein, 6 aa, synthetic construct
DSYGMH

SEQ ID NO: 95 - protein, 6 aa, synthetic construct
DSYSMN

SEQ ID NO: 96 - protein, 6 aa, synthetic construct
SSYGMH

SEQ ID NO: 97 - protein, 6 aa, synthetic construct
DSYGMH

SEQ ID NO: 98 - protein, 6 aa, synthetic construct
SDYSMH

SEQ ID NO: 99 - protein, 6 aa, synthetic construct
DSYGMH

SEQ ID NO: 100 - protein, 6 aa, synthetic construct
DSYGMH

SEQ ID NO: 101 - protein, 6 aa, synthetic construct
SSYGMN

SEQ ID NO: 102 - protein, 6 aa, synthetic construct
DSYGMN

SEQ ID NO: 103 - protein, 6 aa, synthetic construct
DSYGMN

SEQ ID NO: 104 - protein, 6 aa, synthetic construct
DSYSMH

SEQ ID NO: 105 - protein, 6 aa, synthetic construct
DSYSMH

SEQ ID NO: 106 - protein, 6 aa, synthetic construct
DDYGMN

SEQ ID NO: 107 - protein, 6 aa, synthetic construct
DSYGMN

SEQ ID NO: 108 - protein, 6 aa, synthetic construct
DSYGMH

SEQ ID NO: 109 - protein, 6 aa, synthetic construct
DSYGMH

SEQ ID NO: 110 - protein, 6 aa, synthetic construct
SSYSMH

SEQ ID NO: 111 - protein, 6 aa, synthetic construct
DSYGMH

SEQ ID NO: 112 - protein, 6 aa, synthetic construct
SSYGMN

SEQ ID NO: 113 - protein, 6 aa, synthetic construct
SSYGMN

SEQ ID NO: 114 - protein, 6 aa, synthetic construct
SSYGMH

SEQ ID NO: 115 - protein, 6 aa, synthetic construct
SSYGMH

SEQ ID NO: 116 - protein, 6 aa, synthetic construct
SSYSMH

SEQ ID NO: 117 - protein, 6 aa, synthetic construct
DDYGMH

SEQ ID NO: 118 - protein, 6 aa, synthetic construct
SSYGMN

SEQ ID NO: 119 - protein, 6 aa, synthetic construct
SSYGMH

SEQ ID NO: 120 - protein, 6 aa, synthetic construct
SSYGMH

SEQ ID NO: 121 - protein, 6 aa, synthetic construct
DSYGMN

SEQ ID NO: 122 - protein, 6 aa, synthetic construct
SSYGMN

SEQ ID NO: 123 - protein, 6 aa, synthetic construct
DDYGMN

SEQ ID NO: 124 - protein, 6 aa, synthetic construct
DSYGMN

SEQ ID NO: 125 - protein, 6 aa, synthetic construct
DDYSMN

SEQ ID NO: 126 - protein, 6 aa, synthetic construct
DSYGMN

SEQ ID NO: 127 - protein, 6 aa, synthetic construct
SSYSMH

SEQ ID NO: 128 - protein, 6 aa, synthetic construct
SSYGMN

SEQ ID NO: 129 - protein, 6 aa, synthetic construct
DSYGMH

SEQ ID NO: 130 - protein, 6 aa, synthetic construct
SSYGMH

SEQ ID NO: 131 - protein, 6 aa, synthetic construct
DSYSMH

SEQ ID NO: 132 - protein, 6 aa, synthetic construct
SSYGMN

SEQ ID NO: 133 - protein, 6 aa, synthetic construct
DSYGMN

SEQ ID NO: 134 - protein, 6 aa, synthetic construct
SDYGMH

SEQ ID NO: 135 - protein, 6 aa, synthetic construct
SSYGMH

SEQ ID NO: 136 - protein, 6 aa, synthetic construct
DSYGMH

SEQ ID NO: 137 - protein, 6 aa, synthetic construct
SDYSMN

SEQ ID NO: 138 - protein, 6 aa, synthetic construct
SDYGMN

SEQ ID NO: 139 - protein, 13 aa, synthetic construct
WVASINYNSGYTS

SEQ ID NO: 140 - protein, 13 aa, synthetic construct
WVASINYNSGYKG

SEQ ID NO: 141 - protein, 13 aa, synthetic construct
WVAGINYNSGYKG

SEQ ID NO: 142 - protein, 13 aa, synthetic construct
WVSGINYNGGYTS

SEQ ID NO: 143 - protein, 13 aa, synthetic construct
WVAGINYNGGYKS

SEQ ID NO: 144 - protein, 13 aa, synthetic construct
WVASINYNGGYKS

SEQ ID NO: 145 - protein, 13 aa, synthetic construct
WVSGINYNSGYKG

SEQ ID NO: 146 - protein, 13 aa, synthetic construct
WVSSINYNGGYTS

SEQ ID NO: 147 - protein, 13 aa, synthetic construct
WVASINYNGGYKS

SEQ ID NO: 148 - protein, 13 aa, synthetic construct
WVASINYNSGYKG

SEQ ID NO: 149 - protein, 13 aa, synthetic construct
WVAGINYNGGYTS

SEQ ID NO: 150 - protein, 13 aa, synthetic construct
WVSSINYNGGYTG

SEQ ID NO: 151 - protein, 13 aa, synthetic construct
WVSSINYNGGYTG

SEQ ID NO: 152 - protein, 13 aa, synthetic construct
WVAGINYNGGYTG

SEQ ID NO: 153 - protein, 13 aa, synthetic construct
WVASINYNGGYTG

SEQ ID NO: 154 - protein, 13 aa, synthetic construct
WVASINYNGGYTS

SEQ ID NO: 155 - protein, 13 aa, synthetic construct
WVANINYNSGYTS

SEQ ID NO: 156 - protein, 13 aa, synthetic construct
WVASINYNGGYTS

SEQ ID NO: 157 - protein, 13 aa, synthetic construct
WVSNINYNGGYKS

SEQ ID NO: 158 - protein, 13 aa, synthetic construct
WVSSINYNSGYTS

SEQ ID NO: 159 - protein, 13 aa, synthetic construct
WVSGINYNGGYKS

SEQ ID NO: 160 - protein, 13 aa, synthetic construct
WVAGINYNGGYKS

SEQ ID NO: 161 - protein, 13 aa, synthetic construct
WVAGINYNSGYKG

SEQ ID NO: 162 - protein, 13 aa, synthetic construct
WVSSINYNSGYKG

SEQ ID NO: 163 - protein, 13 aa, synthetic construct
WVSGINYNGGYTS

SEQ ID NO: 164 - protein, 13 aa, synthetic construct
WVSSINYNGGYTS

SEQ ID NO: 165 - protein, 13 aa, synthetic construct
WVASINYNGGYTS

SEQ ID NO: 166 - protein, 13 aa, synthetic construct
WVSGINYNGGYKS

SEQ ID NO: 167 - protein, 13 aa, synthetic construct
WVSNINYNGGYTG

SEQ ID NO: 168 - protein, 13 aa, synthetic construct
WVAGINYNSGYKS

SEQ ID NO: 169 - protein, 13 aa, synthetic construct
WVASINYNSGYTS

SEQ ID NO: 170 - protein, 13 aa, synthetic construct
WVAGINYNSGYTS

SEQ ID NO: 171 - protein, 13 aa, synthetic construct
WVAGINYNGGYTS

SEQ ID NO: 172 - protein, 13 aa, synthetic construct
WVASINYNGGYTS

SEQ ID NO: 173 - protein, 13 aa, synthetic construct
WVASINYNSGYKS

SEQ ID NO: 174 - protein, 13 aa, synthetic construct
WVSGINYNGGYKS

SEQ ID NO: 175 - protein, 13 aa, synthetic construct
WVASINYNGGYTS

SEQ ID NO: 176 - protein, 13 aa, synthetic construct
WVSGINYNGGYTG

SEQ ID NO: 177 - protein, 13 aa, synthetic construct
WVASINYNGGYTS

SEQ ID NO: 178 - protein, 13 aa, synthetic construct
WVSSINYNSGYTG

SEQ ID NO: 179 - protein, 13 aa, synthetic construct
WVSGINYNGGYKS

SEQ ID NO: 180 - protein, 13 aa, synthetic construct
WVANINYNGGYKG

SEQ ID NO: 181 - protein, 13 aa, synthetic construct
WVSGINYNGGYKS

SEQ ID NO: 182 - protein, 13 aa, synthetic construct
WVSGINYNGGYKS

SEQ ID NO: 183 - protein, 13 aa, synthetic construct
WVSGINYNGGYTS

SEQ ID NO: 184 - protein, 13 aa, synthetic construct
WVAGINYNSGYTS

SEQ ID NO: 185 - protein, 13 aa, synthetic construct
WVASINYNGGYTS

SEQ ID NO: 186 - protein, 13 aa, synthetic construct
WVASINYNGGYTS

SEQ ID NO: 187 - protein, 13 aa, synthetic construct
WVAGINYNSGYTS

SEQ ID NO: 188 - protein, 13 aa, synthetic construct
WVAGINYNSGYTS

SEQ ID NO: 189 - protein, 13 aa, synthetic construct
WVASINYNGGYTS

SEQ ID NO: 190 - protein, 13 aa, synthetic construct
WVAGINYNGGYKS

SEQ ID NO: 191 - protein, 13 aa, synthetic construct
WVSSINYNSGYKS

SEQ ID NO: 192 - protein, 13 aa, synthetic construct
WVASINYNGGYTS

SEQ ID NO: 193 - protein, 13 aa, synthetic construct
WVASINYNGGYTS

SEQ ID NO: 194 - protein, 13 aa, synthetic construct
WVAGINYNSGYTS

SEQ ID NO: 195 - protein, 13 aa, synthetic construct
WVSGINYNGGYTS

SEQ ID NO: 196 - protein, 12 aa, synthetic construct
ARAANWHDTALD

SEQ ID NO: 197 - protein, 12 aa, synthetic construct
ARAANWHDTALD

SEQ ID NO: 198 - protein, 12 aa, synthetic construct
ARAANWHDTHLD

SEQ ID NO: 199 - protein, 12 aa, synthetic construct
ARAANWHDTALD

SEQ ID NO: 200 - protein, 12 aa, synthetic construct
ARAANWHDTALD

SEQ ID NO: 201 - protein, 12 aa, synthetic construct
ARAANWHDTALD

SEQ ID NO: 202 - protein, 12 aa, synthetic construct
ARAANWHDTHLD

SEQ ID NO: 203 - protein, 12 aa, synthetic construct
ARAANWHDTALD

SEQ ID NO: 204 - protein, 12 aa, synthetic construct
ARAANWHDTALD

SEQ ID NO: 205 - protein, 12 aa, synthetic construct
ARAANWHDTHLD

SEQ ID NO: 206 - protein, 12 aa, synthetic construct
ARAANWHDTALD

SEQ ID NO: 207 - protein, 12 aa, synthetic construct
ARAANWHDTHLD

SEQ ID NO: 208 - protein, 12 aa, synthetic construct
ARAANWHDTHLD

SEQ ID NO: 209 - protein, 12 aa, synthetic construct
ARAANWHDTHLD

SEQ ID NO: 210 - protein, 12 aa, synthetic construct
ARAANWHDTHLD

SEQ ID NO: 211 - protein, 12 aa, synthetic construct
ARAANWHDTALD

SEQ ID NO: 212 - protein, 12 aa, synthetic construct
ARAANWHDTALD

SEQ ID NO: 213 - protein, 12 aa, synthetic construct
ARAANWHDTHLD

SEQ ID NO: 214 - protein, 12 aa, synthetic construct
ARAANWHDTALD

SEQ ID NO: 215 - protein, 12 aa, synthetic construct
ARAANWHDTALD

SEQ ID NO: 216 - protein, 12 aa, synthetic construct
ARAANWHDTALD

SEQ ID NO: 217 - protein, 12 aa, synthetic construct
ARAANWHDTHLD

SEQ ID NO: 218 - protein, 12 aa, synthetic construct
ARAANWHDTHLD

SEQ ID NO: 219 - protein, 12 aa, synthetic construct
ARAANWHDTALD

SEQ ID NO: 220 - protein, 12 aa, synthetic construct
ARAANWHDTALD

SEQ ID NO: 221 - protein, 12 aa, synthetic construct
ARAANWHDTHLD

SEQ ID NO: 222 - protein, 12 aa, synthetic construct
ARAANWHDTALD

SEQ ID NO: 223 - protein, 12 aa, synthetic construct
ARAANWHDTHLD

SEQ ID NO: 224 - protein, 12 aa, synthetic construct
ARAANWHDTHLD

SEQ ID NO: 225 - protein, 12 aa, synthetic construct
ARAANWHDTHLD

SEQ ID NO: 226 - protein, 12 aa, synthetic construct
ARAANWHDTHLD

SEQ ID NO: 227 - protein, 12 aa, synthetic construct
ARAANWHDTHLD

SEQ ID NO: 228 - protein, 12 aa, synthetic construct
ARAANWHDTALD

SEQ ID NO: 229 - protein, 12 aa, synthetic construct
ARAANWHDTALD

SEQ ID NO: 230 - protein, 12 aa, synthetic construct
ARAANWHDTALD

SEQ ID NO: 231 - protein, 12 aa, synthetic construct
ARAANWHDTALD

SEQ ID NO: 232 - protein, 12 aa, synthetic construct
ARAANWHDTHLD

SEQ ID NO: 233 - protein, 12 aa, synthetic construct
ARAANWHDTALD

SEQ ID NO: 234 - protein, 12 aa, synthetic construct
ARAANWHDTHLD

SEQ ID NO: 235 - protein, 12 aa, synthetic construct
ARAANWHDTALD

SEQ ID NO: 236 - protein, 12 aa, synthetic construct
ARAANWHDTALD

SEQ ID NO: 237 - protein, 12 aa, synthetic construct
ARAANWHDTHLD

SEQ ID NO: 238 - protein, 12 aa, synthetic construct
ARAANWHDTALD

SEQ ID NO: 239 - protein, 12 aa, synthetic construct
ARAANWHDTHLD

SEQ ID NO: 240 - protein, 12 aa, synthetic construct
ARAANWHDTALD

SEQ ID NO: 241 - protein, 12 aa, synthetic construct
ARAANWHDTHLD

SEQ ID NO: 242 - protein, 12 aa, synthetic construct
ARAANWHDTALD

SEQ ID NO: 243 - protein, 12 aa, synthetic construct
ARAANWHDTALD

SEQ ID NO: 244 - protein, 12 aa, synthetic construct
ARAANWHDTALD

SEQ ID NO: 245 - protein, 12 aa, synthetic construct
ARAANWHDTHLD

SEQ ID NO: 246 - protein, 12 aa, synthetic construct
ARAANWHDTHLD

SEQ ID NO: 247 - protein, 12 aa, synthetic construct
ARAANWHDTALD

SEQ ID NO: 248 - protein, 12 aa, synthetic construct
ARAANWHDTALD

SEQ ID NO: 249 - protein, 12 aa, synthetic construct
ARAANWHDTALD

SEQ ID NO: 250 - protein, 12 aa, synthetic construct
ARAANWHDTALD

SEQ ID NO: 251 - protein, 12 aa, synthetic construct
ARAANWHDTHLD

SEQ ID NO: 252 - protein, 12 aa, synthetic construct
ARAANWHDTALD

SEQ ID NO: 253 - protein, 7 aa, synthetic construct
LTYLNWY

SEQ ID NO: 254 - protein, 7 aa, synthetic construct
LRYLNWY

SEQ ID NO: 255 - protein, 7 aa, synthetic construct
LTYVNWY

SEQ ID NO: 256 - protein, 7 aa, synthetic construct
STYVNWY

SEQ ID NO: 257 - protein, 7 aa, synthetic construct
SSYLNWY

SEQ ID NO: 258 - protein, 7 aa, synthetic construct
LSYVNWY

SEQ ID NO: 259 - protein, 7 aa, synthetic construct
ISYVNWY

SEQ ID NO: 260 - protein, 7 aa, synthetic construct
VSYLNWY

SEQ ID NO: 261 - protein, 7 aa, synthetic construct
SSYLNWY

SEQ ID NO: 262 - protein, 7 aa, synthetic construct
VSYVNWY

SEQ ID NO: 263 - protein, 7 aa, synthetic construct
LTYLNWY

SEQ ID NO: 264 - protein, 7 aa, synthetic construct
LTYVNWY

SEQ ID NO: 265 - protein, 7 aa, synthetic construct
LSYVNWY

SEQ ID NO: 266 - protein, 7 aa, synthetic construct
VSYLNWY

SEQ ID NO: 267 - protein, 7 aa, synthetic construct
VSYVNWY

SEQ ID NO: 268 - protein, 7 aa, synthetic construct
LSYVNWY

SEQ ID NO: 269 - protein, 7 aa, synthetic construct
LSYLNWY

SEQ ID NO: 270 - protein, 7 aa, synthetic construct
LSYVNWY

SEQ ID NO: 271 - protein, 7 aa, synthetic construct
ISYLNWY

SEQ ID NO: 272 - protein, 7 aa, synthetic construct
SSYVNWY

SEQ ID NO: 273 - protein, 7 aa, synthetic construct
LTYLNWY

SEQ ID NO: 274 - protein, 7 aa, synthetic construct
ISYVNWY

SEQ ID NO: 275 - protein, 7 aa, synthetic construct
LSYVNWY

SEQ ID NO: 276 - protein, 7 aa, synthetic construct
LTYLNWY

SEQ ID NO: 277 - protein, 7 aa, synthetic construct
LTYLNWY

SEQ ID NO: 278 - protein, 7 aa, synthetic construct
LTYVNWY

SEQ ID NO: 279 - protein, 7 aa, synthetic construct
LTYLNWY

SEQ ID NO: 280 - protein, 7 aa, synthetic construct
LSYLNWY

SEQ ID NO: 281 - protein, 7 aa, synthetic construct
LTYVNWY

SEQ ID NO: 282 - protein, 7 aa, synthetic construct
VSYVNWY

SEQ ID NO: 283 - protein, 7 aa, synthetic construct
LSYLNWY

SEQ ID NO: 284 - protein, 7 aa, synthetic construct
VSYVNWY

SEQ ID NO: 285 - protein, 7 aa, synthetic construct
LTYVNWY

SEQ ID NO: 286 - protein, 7 aa, synthetic construct
LSYLNWY

SEQ ID NO: 287 - protein, 7 aa, synthetic construct
VSYLNWY

SEQ ID NO: 288 - protein, 7 aa, synthetic construct
LSYVNWY

SEQ ID NO: 289 - protein, 7 aa, synthetic construct
ISYLNWY

SEQ ID NO: 290 - protein, 7 aa, synthetic construct
LSYVNWY

SEQ ID NO: 291 - protein, 7 aa, synthetic construct
LSYVNWY

SEQ ID NO: 292 - protein, 7 aa, synthetic construct
LTYLNWY

SEQ ID NO: 293 - protein, 7 aa, synthetic construct
VTYVNWY

SEQ ID NO: 294 - protein, 7 aa, synthetic construct
LTYLNWY

SEQ ID NO: 295 - protein, 7 aa, synthetic construct
LSYLNWY

SEQ ID NO: 296 - protein, 7 aa, synthetic construct
ISYLNWY

SEQ ID NO: 297 - protein, 7 aa, synthetic construct
LSYLNWY

SEQ ID NO: 298 - protein, 7 aa, synthetic construct
LTYVNWY

SEQ ID NO: 299 - protein, 7 aa, synthetic construct
ISYVNWY

SEQ ID NO: 300 - protein, 7 aa, synthetic construct
VSYLNWY

SEQ ID NO: 301 - protein, 7 aa, synthetic construct
VSYVNWY

SEQ ID NO: 302 - protein, 7 aa, synthetic construct
ISYLNWY

SEQ ID NO: 303 - protein, 7 aa, synthetic construct
ISYVNWY

SEQ ID NO: 304 - protein, 7 aa, synthetic construct
LTYLNWY

SEQ ID NO: 305 - protein, 7 aa, synthetic construct
VSYLNWY

SEQ ID NO: 306 - protein, 7 aa, synthetic construct
STYLNWY

SEQ ID NO: 307 - protein, 7 aa, synthetic construct
LTYLNWY

SEQ ID NO: 308 - protein, 7 aa, synthetic construct
LTYLNWY

SEQ ID NO: 309 - protein, 7 aa, synthetic construct
SRYLNWY

SEQ ID NO: 310 - protein, 10 aa, synthetic construct
LLIYAATSRH

SEQ ID NO: 311 - protein, 10 aa, synthetic construct
LLIYAATSRA

SEQ ID NO: 312 - protein, 10 aa, synthetic construct
LVIYATTSLA

SEQ ID NO: 313 - protein, 10 aa, synthetic construct
LLIYAVTSLA

SEQ ID NO: 314 - protein, 10 aa, synthetic construct
LVIYAVTSRA

SEQ ID NO: 315 - protein, 10 aa, synthetic construct
LLIYAATSLA

SEQ ID NO: 316 - protein, 10 aa, synthetic construct
LLIYAATSRA

SEQ ID NO: 317 - protein, 10 aa, synthetic construct
LLIYAATSRA

SEQ ID NO: 318 - protein, 10 aa, synthetic construct
LLIYAASSLQ

SEQ ID NO: 319 - protein, 10 aa, synthetic construct
LLIYAATSRA

SEQ ID NO: 320 - protein, 10 aa, synthetic construct
LVIYAATSLA

SEQ ID NO: 321 - protein, 10 aa, synthetic construct
LLIYAATSRA

SEQ ID NO: 322 - protein, 10 aa, synthetic construct
LLIYAATSRA

SEQ ID NO: 323 - protein, 10 aa, synthetic construct
LVIYAATSRA

SEQ ID NO: 324 - protein, 10 aa, synthetic construct
LVIYAATSRA

SEQ ID NO: 325 - protein, 10 aa, synthetic construct
LVIYAATSRA

SEQ ID NO: 326 - protein, 10 aa, synthetic construct
LVIYAATSRA

SEQ ID NO: 327 - protein, 10 aa, synthetic construct
LVIYAATSRH

SEQ ID NO: 328 - protein, 10 aa, synthetic construct
LLIYAATSRA

SEQ ID NO: 329 - protein, 10 aa, synthetic construct
LLIYAVTSRA

SEQ ID NO: 330 - protein, 10 aa, synthetic construct
LVIYAATSRA

SEQ ID NO: 331 - protein, 10 aa, synthetic construct
LVIYAATSRA

SEQ ID NO: 332 - protein, 10 aa, synthetic construct
LLIYAATSRH

SEQ ID NO: 333 - protein, 10 aa, synthetic construct
LVIYAATSRA

SEQ ID NO: 334 - protein, 10 aa, synthetic construct
LVIYAATSLA

SEQ ID NO: 335 - protein, 10 aa, synthetic construct
LVIYAATSRA

SEQ ID NO: 336 - protein, 10 aa, synthetic construct
LVIYAATSRA

SEQ ID NO: 337 - protein, 10 aa, synthetic construct
LLIYAASSLQ

SEQ ID NO: 338 - protein, 10 aa, synthetic construct
LLIYAATSLA

SEQ ID NO: 339 - protein, 10 aa, synthetic construct
LLIYAATSLA

SEQ ID NO: 340 - protein, 10 aa, synthetic construct
LLIYAASSLQ

SEQ ID NO: 341 - protein, 10 aa, synthetic construct
LLIYAATSRA

SEQ ID NO: 342 - protein, 10 aa, synthetic construct
LVIYAATSLA

SEQ ID NO: 343 - protein, 10 aa, synthetic construct
LVIYAATSRA

SEQ ID NO: 344 - protein, 10 aa, synthetic construct
LLIYATTSRA

SEQ ID NO: 345 - protein, 10 aa, synthetic construct
LLIYVASSRA

SEQ ID NO: 346 - protein, 10 aa, synthetic construct
LVIYAATSLA

SEQ ID NO: 347 - protein, 10 aa, synthetic construct
LLIYAATSRA

SEQ ID NO: 348 - protein, 10 aa, synthetic construct
LLIYAATSRH

SEQ ID NO: 349 - protein, 10 aa, synthetic construct
LLIYAVTSRA

SEQ ID NO: 350 - protein, 10 aa, synthetic construct
LVIYAATSRA

SEQ ID NO: 351 - protein, 10 aa, synthetic construct
LVIYAATSRA

SEQ ID NO: 352 - protein, 10 aa, synthetic construct
LLIYAATSRA

SEQ ID NO: 353 - protein, 10 aa, synthetic construct
LVIYAATSLA

SEQ ID NO: 354 - protein, 10 aa, synthetic construct
LVIYAATSRA

SEQ ID NO: 355 - protein, 10 aa, synthetic construct
LVIYAATSLA

SEQ ID NO: 356 - protein, 10 aa, synthetic construct
LVIYAATSRA

SEQ ID NO: 357 - protein, 10 aa, synthetic construct
LVIYAATSRA

SEQ ID NO: 358 - protein, 10 aa, synthetic construct
LLIYAATSRH

SEQ ID NO: 359 - protein, 10 aa, synthetic construct
LLIYAATSRA

SEQ ID NO: 360 - protein, 10 aa, synthetic construct
LVIYAATSRA

SEQ ID NO: 361 - protein, 10 aa, synthetic construct
LVIYYVNNLP

SEQ ID NO: 362 - protein, 10 aa, synthetic construct
LLIYYVTNLA

SEQ ID NO: 363 - protein, 10 aa, synthetic construct
LVIYAASSLQ

SEQ ID NO: 364 - protein, 10 aa, synthetic construct
LVIYAATSRA

SEQ ID NO: 365 - protein, 10 aa, synthetic construct
LLIYAATSRH

SEQ ID NO: 366 - protein, 10 aa, synthetic construct
LVIYAATSLA

SEQ ID NO: 367 - protein, 8 aa, synthetic construct
QQSDESPL

SEQ ID NO: 368 - protein, 8 aa, synthetic construct
QQSDNLPL

SEQ ID NO: 369 - protein, 8 aa, synthetic construct
QQSYNTPL

SEQ ID NO: 370 - protein, 8 aa, synthetic construct
QQSYDNPL

SEQ ID NO: 371 - protein, 8 aa, synthetic construct
QQSYDLPL

SEQ ID NO: 372 - protein, 8 aa, synthetic construct
QQSYELPL

SEQ ID NO: 373 - protein, 8 aa, synthetic construct
QQSYNTPL

SEQ ID NO: 374 - protein, 8 aa, synthetic construct
QQSYDNPL

SEQ ID NO: 375 - protein, 8 aa, synthetic construct
QQSYSTPL

SEQ ID NO: 376 - protein, 8 aa, synthetic construct
QQSYDLPL

SEQ ID NO: 377 - protein, 8 aa, synthetic construct
QQSDDSPL

SEQ ID NO: 378 - protein, 8 aa, synthetic construct
QQSYENPL

SEQ ID NO: 379 - protein, 8 aa, synthetic construct
QQSYDLPL

SEQ ID NO: 380 - protein, 8 aa, synthetic construct
QQSYDTPL

SEQ ID NO: 381 - protein, 8 aa, synthetic construct
QQSYDNPL

SEQ ID NO: 382 - protein, 8 aa, synthetic construct
QQSYENPL

SEQ ID NO: 383 - protein, 8 aa, synthetic construct
QQSYSTPL

SEQ ID NO: 384 - protein, 8 aa, synthetic construct
QQSYNTPL

SEQ ID NO: 385 - protein, 8 aa, synthetic construct
QQSYDSPL

SEQ ID NO: 386 - protein, 8 aa, synthetic construct
QQSYDSPL

SEQ ID NO: 387 - protein, 8 aa, synthetic construct
QQSYDNPL

SEQ ID NO: 388 - protein, 8 aa, synthetic construct
QQSYDTPL

SEQ ID NO: 389 - protein, 8 aa, synthetic construct
QQSYNSPL

SEQ ID NO: 390 - protein, 8 aa, synthetic construct
QQSYDSPL

SEQ ID NO: 391 - protein, 8 aa, synthetic construct
QHSYENPL

SEQ ID NO: 392 - protein, 8 aa, synthetic construct
QQSYENPL

SEQ ID NO: 393 - protein, 8 aa, synthetic construct
QQSDELPL

SEQ ID NO: 394 - protein, 8 aa, synthetic construct
QQSYDSPL

SEQ ID NO: 395 - protein, 8 aa, synthetic construct
QQSYDLPL

SEQ ID NO: 396 - protein, 8 aa, synthetic construct
QQSYDNPL

SEQ ID NO: 397 - protein, 8 aa, synthetic construct
QQSYSLPL

SEQ ID NO: 398 - protein, 8 aa, synthetic construct
QQSYDTPL

SEQ ID NO: 399 - protein, 8 aa, synthetic construct
QQSYELPL

SEQ ID NO: 400 - protein, 8 aa, synthetic construct
QQSYDSPL

SEQ ID NO: 401 - protein, 8 aa, synthetic construct
QQSYDTPL

SEQ ID NO: 402 - protein, 8 aa, synthetic construct
QQSYSLPL

SEQ ID NO: 403 - protein, 8 aa, synthetic construct
QQSYSSPL

SEQ ID NO: 404 - protein, 8 aa, synthetic construct
QQSYSTPL

SEQ ID NO: 405 - protein, 8 aa, synthetic construct
QQSYSLPL

SEQ ID NO: 406 - protein, 8 aa, synthetic construct
QQSYDTPL

SEQ ID NO: 407 - protein, 8 aa, synthetic construct
QQSYDSPL

SEQ ID NO: 408 - protein, 8 aa, synthetic construct
QQSYELPL

SEQ ID NO: 409 - protein, 8 aa, synthetic construct
QQSYELPL

SEQ ID NO: 410 - protein, 8 aa, synthetic construct
QQSYENPL

SEQ ID NO: 411 - protein, 8 aa, synthetic construct
QQSYNSPL

SEQ ID NO: 412 - protein, 8 aa, synthetic construct
QQSYDTPL

SEQ ID NO: 413 - protein, 8 aa, synthetic construct
QQSYDLPL

SEQ ID NO: 414 - protein, 8 aa, synthetic construct
QQSYDSPL

SEQ ID NO: 415 - protein, 8 aa, synthetic construct
  VARIANT 5: note = any amino acid
QQSYXNPL

SEQ ID NO: 416 - protein, 8 aa, synthetic construct
QQSYDSPL

SEQ ID NO: 417 - protein, 8 aa, synthetic construct
QQSYDTPL

SEQ ID NO: 418 - protein, 8 aa, synthetic construct
QQSYNSPL

SEQ ID NO: 419 - protein, 8 aa, synthetic construct
QQSYDNPL

SEQ ID NO: 420 - protein, 8 aa, synthetic construct
QQSYSTPL

SEQ ID NO: 421 - protein, 8 aa, synthetic construct
QQSDELPL

SEQ ID NO: 422 - protein, 8 aa, synthetic construct
QQSYSNPL

SEQ ID NO: 423 - protein, 8 aa, synthetic construct
QQSYDNPL

SEQ ID NO: 424 - protein, 6 aa, synthetic construct
SSYGMH

SEQ ID NO: 425 - protein, 6 aa, synthetic construct
DSYGMN

SEQ ID NO: 426 - protein, 6 aa, synthetic construct
SDYGMH

SEQ ID NO: 427 - protein, 6 aa, synthetic construct
DDYSMH

SEQ ID NO: 428 - protein, 6 aa, synthetic construct
DSYSMH

SEQ ID NO: 429 - protein, 6 aa, synthetic construct
DSYGMN

SEQ ID NO: 430 - protein, 6 aa, synthetic construct
DDYGMH

SEQ ID NO: 431 - protein, 6 aa, synthetic construct
DSYGMH

SEQ ID NO: 432 - protein, 6 aa, synthetic construct
SSYGMH

SEQ ID NO: 433 - protein, 6 aa, synthetic construct
SDYGMH

SEQ ID NO: 434 - protein, 6 aa, synthetic construct
DDYGMH

SEQ ID NO: 435 - protein, 6 aa, synthetic construct
DSYGMH

SEQ ID NO: 436 - protein, 6 aa, synthetic construct
DSYGMH

SEQ ID NO: 437 - protein, 6 aa, synthetic construct
DDYSMH

SEQ ID NO: 438 - protein, 6 aa, synthetic construct
DSYSMH

SEQ ID NO: 439 - protein, 6 aa, synthetic construct
SSYGMH

SEQ ID NO: 440 - protein, 6 aa, synthetic construct
SDYGMN

SEQ ID NO: 441 - protein, 6 aa, synthetic construct
SSYGMH

SEQ ID NO: 442 - protein, 6 aa, synthetic construct
SSYGMH

SEQ ID NO: 443 - protein, 6 aa, synthetic construct
DSYGMN

SEQ ID NO: 444 - protein, 6 aa, synthetic construct
DSYSMH

SEQ ID NO: 445 - protein, 6 aa, synthetic construct
SSYGMH

SEQ ID NO: 446 - protein, 6 aa, synthetic construct
DSYGMN

SEQ ID NO: 447 - protein, 6 aa, synthetic construct
DSYGMH

SEQ ID NO: 448 - protein, 6 aa, synthetic construct
DSYGMH

SEQ ID NO: 449 - protein, 6 aa, synthetic construct
DSYGMH

SEQ ID NO: 450 - protein, 6 aa, synthetic construct
SSYGMH

SEQ ID NO: 451 - protein, 6 aa, synthetic construct
DSYGMH

SEQ ID NO: 452 - protein, 6 aa, synthetic construct
SDYSMH

SEQ ID NO: 453 - protein, 6 aa, synthetic construct
SSYGMN

SEQ ID NO: 454 - protein, 6 aa, synthetic construct
DSYGMH

SEQ ID NO: 455 - protein, 6 aa, synthetic construct
DSYSMH

SEQ ID NO: 456 - protein, 6 aa, synthetic construct
DSYGMH

SEQ ID NO: 457 - protein, 6 aa, synthetic construct
DSYGMH

SEQ ID NO: 458 - protein, 6 aa, synthetic construct
DDYSMH

SEQ ID NO: 459 - protein, 6 aa, synthetic construct
DSYGMH

SEQ ID NO: 460 - protein, 6 aa, synthetic construct
SSYSMH

SEQ ID NO: 461 - protein, 6 aa, synthetic construct
DSYGMH

SEQ ID NO: 462 - protein, 6 aa, synthetic construct
DSYGMH

SEQ ID NO: 463 - protein, 6 aa, synthetic construct
SSYSMH

SEQ ID NO: 464 - protein, 6 aa, synthetic construct
SSYGMH

SEQ ID NO: 465 - protein, 6 aa, synthetic construct
SDYGMH

SEQ ID NO: 466 - protein, 6 aa, synthetic construct
SSYGMH

SEQ ID NO: 467 - protein, 6 aa, synthetic construct
SSYGMH

SEQ ID NO: 468 - protein, 6 aa, synthetic construct
SSYGMH

SEQ ID NO: 469 - protein, 6 aa, synthetic construct
DSYGMH

SEQ ID NO: 470 - protein, 6 aa, synthetic construct
SSYGMH

SEQ ID NO: 471 - protein, 6 aa, synthetic construct
SSYGMH

SEQ ID NO: 472 - protein, 6 aa, synthetic construct
DSYGMN

SEQ ID NO: 473 - protein, 6 aa, synthetic construct
SSYSMH

SEQ ID NO: 474 - protein, 6 aa, synthetic construct
DSYGMH

SEQ ID NO: 475 - protein, 6 aa, synthetic construct
DDYGMH

SEQ ID NO: 476 - protein, 6 aa, synthetic construct
SSYGMH

SEQ ID NO: 477 - protein, 6 aa, synthetic construct
SDYGMH

SEQ ID NO: 478 - protein, 6 aa, synthetic construct
SSYGMN

SEQ ID NO: 479 - protein, 6 aa, synthetic construct
DSYGMH

SEQ ID NO: 480 - protein, 6 aa, synthetic construct
SSYGMH

SEQ ID NO: 481 - protein, 6 aa, synthetic construct
SSYGMH

SEQ ID NO: 482 - protein, 6 aa, synthetic construct
SSYGMH

SEQ ID NO: 483 - protein, 6 aa, synthetic construct
DSYGMH

SEQ ID NO: 484 - protein, 6 aa, synthetic construct
DSYGMH

SEQ ID NO: 485 - protein, 6 aa, synthetic construct
SSYGMH

SEQ ID NO: 486 - protein, 6 aa, synthetic construct
SSYGMH

SEQ ID NO: 487 - protein, 6 aa, synthetic construct
DSYSMH

SEQ ID NO: 488 - protein, 6 aa, synthetic construct
  VARIANT 1: note = any amino acid
XSYGMN

SEQ ID NO: 489 - protein, 6 aa, synthetic construct
SSYSMN

SEQ ID NO: 490 - protein, 6 aa, synthetic construct
SSYGMH

SEQ ID NO: 491 - protein, 6 aa, synthetic construct
SSYGMH

SEQ ID NO: 492 - protein, 6 aa, synthetic construct
DSYGMN

SEQ ID NO: 493 - protein, 6 aa, synthetic construct
DSYSMH

SEQ ID NO: 494 - protein, 6 aa, synthetic construct
SDYGMH

SEQ ID NO: 495 - protein, 13 aa, synthetic construct
WVSSINYNGGYTS

SEQ ID NO: 496 - protein, 13 aa, synthetic construct
WVSNINYNSGYKG

SEQ ID NO: 497 - protein, 13 aa, synthetic construct
WVSGINYNGGYTS

SEQ ID NO: 498 - protein, 13 aa, synthetic construct
WVASINYNGGYKS

SEQ ID NO: 499 - protein, 13 aa, synthetic construct
WVSSINYNGGYTS

SEQ ID NO: 500 - protein, 13 aa, synthetic construct
WVSGINYNGGYTG

SEQ ID NO: 501 - protein, 13 aa, synthetic construct
WVSGINYNGGYTS

SEQ ID NO: 502 - protein, 13 aa, synthetic construct
WVAGINYNGGYTS

SEQ ID NO: 503 - protein, 13 aa, synthetic construct
WVASINYNGGYTS

SEQ ID NO: 504 - protein, 13 aa, synthetic construct
WVSSINYNSGYKS

SEQ ID NO: 505 - protein, 13 aa, synthetic construct
WVSSINYNGGYTG

SEQ ID NO: 506 - protein, 13 aa, synthetic construct
WVAGINYNGGYTS

SEQ ID NO: 507 - protein, 13 aa, synthetic construct
WVSSINYNGGYTS

SEQ ID NO: 508 - protein, 13 aa, synthetic construct
WVANINYNGGYTS

SEQ ID NO: 509 - protein, 13 aa, synthetic construct
WVASINYNGGYKS

SEQ ID NO: 510 - protein, 13 aa, synthetic construct
WVSGINYNGGYTS

SEQ ID NO: 511 - protein, 13 aa, synthetic construct
WVASINYNGGYTS

SEQ ID NO: 512 - protein, 13 aa, synthetic construct
WVSSINYNGGYTG

SEQ ID NO: 513 - protein, 13 aa, synthetic construct
WVSSINYNSGYTS

SEQ ID NO: 514 - protein, 13 aa, synthetic construct
WVSGINYNSGYTS

SEQ ID NO: 515 - protein, 13 aa, synthetic construct
WVANINYNGGYTS

SEQ ID NO: 516 - protein, 13 aa, synthetic construct
WVASINYNGGYTS

SEQ ID NO: 517 - protein, 13 aa, synthetic construct
WVSSINYNGGYTS

SEQ ID NO: 518 - protein, 13 aa, synthetic construct
WVSSINYNGGYTS

SEQ ID NO: 519 - protein, 13 aa, synthetic construct
WVSGINYNSGYTS

SEQ ID NO: 520 - protein, 13 aa, synthetic construct
WVSNINYNGGYTS

SEQ ID NO: 521 - protein, 13 aa, synthetic construct
WVAGINYNSGYTS

SEQ ID NO: 522 - protein, 13 aa, synthetic construct
WVASINYNGGYTS

SEQ ID NO: 523 - protein, 13 aa, synthetic construct
WVASINYNGGYTS

SEQ ID NO: 524 - protein, 13 aa, synthetic construct
WVSNINYNGGYTG

SEQ ID NO: 525 - protein, 13 aa, synthetic construct
WVASINYNGGYTG

SEQ ID NO: 526 - protein, 13 aa, synthetic construct
WVSSINYNGGYKS

SEQ ID NO: 527 - protein, 13 aa, synthetic construct
WVANINYNSGYTG

SEQ ID NO: 528 - protein, 13 aa, synthetic construct
WVSGINYNSGYKS

SEQ ID NO: 529 - protein, 13 aa, synthetic construct
WVASINYNGGYTG

SEQ ID NO: 530 - protein, 13 aa, synthetic construct
WVASINYNGGYKS

SEQ ID NO: 531 - protein, 13 aa, synthetic construct
WVASINYNSGYTG

SEQ ID NO: 532 - protein, 13 aa, synthetic construct
WVANINYNGGYKS

SEQ ID NO: 533 - protein, 13 aa, synthetic construct
WVSSINYNGGYTS

SEQ ID NO: 534 - protein, 13 aa, synthetic construct
WVSSINYNGGYKS

SEQ ID NO: 535 - protein, 13 aa, synthetic construct
WVSSINYNGGYTG

SEQ ID NO: 536 - protein, 13 aa, synthetic construct
WVAGINYNGGYTG

SEQ ID NO: 537 - protein, 13 aa, synthetic construct
WVAGINYNGGYTS

SEQ ID NO: 538 - protein, 13 aa, synthetic construct
WVAGINYNGGYTS

SEQ ID NO: 539 - protein, 13 aa, synthetic construct
WVANINYNSGYKS

SEQ ID NO: 540 - protein, 13 aa, synthetic construct
WVAGINYNGGYTS

SEQ ID NO: 541 - protein, 13 aa, synthetic construct
WVSNINYNGGYTS

SEQ ID NO: 542 - protein, 13 aa, synthetic construct
WVSNINYNGGYKS

SEQ ID NO: 543 - protein, 13 aa, synthetic construct
WVSNINYNGGYTS

SEQ ID NO: 544 - protein, 13 aa, synthetic construct
WVASINYNSGYTS

SEQ ID NO: 545 - protein, 13 aa, synthetic construct
WVAGINYNSGYTG

SEQ ID NO: 546 - protein, 13 aa, synthetic construct
WVSGINYNGGYTS

SEQ ID NO: 547 - protein, 13 aa, synthetic construct
WVAGINYNGGYTS

SEQ ID NO: 548 - protein, 13 aa, synthetic construct
WVAGINYNGGYTS

SEQ ID NO: 549 - protein, 13 aa, synthetic construct
WVAGINYNGGYTS

SEQ ID NO: 550 - protein, 13 aa, synthetic construct
WVSGINYNGGYKS

SEQ ID NO: 551 - protein, 13 aa, synthetic construct
WVAGINYNGGYTS

SEQ ID NO: 552 - protein, 13 aa, synthetic construct
WVASINYNSGYTG

SEQ ID NO: 553 - protein, 13 aa, synthetic construct
WVSGINYNGGYTS

SEQ ID NO: 554 - protein, 13 aa, synthetic construct
WVSSINYNGGYTS

SEQ ID NO: 555 - protein, 13 aa, synthetic construct
WVAGINYNSGYTS

SEQ ID NO: 556 - protein, 13 aa, synthetic construct
WVSSINYNGGYKS

SEQ ID NO: 557 - protein, 13 aa, synthetic construct
WVASINYNGGYTS

SEQ ID NO: 558 - protein, 13 aa, synthetic construct
WVSGINYNGGYTS

SEQ ID NO: 559 - protein, 13 aa, synthetic construct
WVASINYNGGYKG

SEQ ID NO: 560 - protein, 13 aa, synthetic construct
WVSNINYNGGYTS

SEQ ID NO: 561 - protein, 13 aa, synthetic construct
WVSGINYNGGYTS

SEQ ID NO: 562 - protein, 13 aa, synthetic construct
WVAGINYNSGYTG

SEQ ID NO: 563 - protein, 13 aa, synthetic construct
WVANINYNSGYKS

SEQ ID NO: 564 - protein, 13 aa, synthetic construct
WVSSINYNGGYKS

SEQ ID NO: 565 - protein, 13 aa, synthetic construct
WVASINYNGGYTS

SEQ ID NO: 566 - skipped

SEQ ID NO: 567 - protein, 6 aa, synthetic construct
SEQIDN

SEQ ID NO: 568 - protein, 6 aa, synthetic construct
SEQIDN

SEQ ID NO: 569 - protein, 6 aa, synthetic construct
SEQIDN

SEQ ID NO: 570 - protein, 6 aa, synthetic construct
SEQIDN

SEQ ID NO: 571 - protein, 6 aa, synthetic construct
SEQIDN

SEQ ID NO: 572 - protein, 6 aa, synthetic construct
SEQIDN

SEQ ID NO: 573 - protein, 6 aa, synthetic construct
SEQIDN

SEQ ID NO: 574 - protein, 6 aa, synthetic construct
SEQIDN

SEQ ID NO: 575 - protein, 6 aa, synthetic construct
SEQIDN

SEQ ID NO: 576 - protein, 6 aa, synthetic construct
SEQIDN

SEQ ID NO: 577 - protein, 6 aa, synthetic construct
SEQIDN

SEQ ID NO: 578 - protein, 6 aa, synthetic construct
SEQIDN

SEQ ID NO: 579 - protein, 6 aa, synthetic construct
SEQIDN

SEQ ID NO: 580 - protein, 6 aa, synthetic construct
SEQIDN

SEQ ID NO: 581 - protein, 6 aa, synthetic construct
SEQIDN

SEQ ID NO: 582 - protein, 6 aa, synthetic construct
SEQIDN

SEQ ID NO: 583 - protein, 6 aa, synthetic construct
SEQIDN

SEQ ID NO: 584 - protein, 6 aa, synthetic construct
SEQIDN

SEQ ID NO: 585 - protein, 6 aa, synthetic construct
SEQIDN

SEQ ID NO: 586 - protein, 6 aa, synthetic construct
SEQIDN

SEQ ID NO: 587 - protein, 6 aa, synthetic construct
SEQIDN

SEQ ID NO: 588 - protein, 6 aa, synthetic construct
SEQIDN

SEQ ID NO: 589 - protein, 6 aa, synthetic construct
SEQIDN

SEQ ID NO: 590 - protein, 6 aa, synthetic construct
SEQIDN

SEQ ID NO: 591 - protein, 6 aa, synthetic construct
SEQIDN

SEQ ID NO: 592 - protein, 6 aa, synthetic construct
SEQIDN

SEQ ID NO: 593 - protein, 6 aa, synthetic construct
SEQIDN

SEQ ID NO: 594 - protein, 6 aa, synthetic construct
SEQIDN

SEQ ID NO: 595 - protein, 6 aa, synthetic construct
SEQIDN

SEQ ID NO: 596 - protein, 6 aa, synthetic construct
SEQIDN

SEQ ID NO: 597 - protein, 6 aa, synthetic construct
SEQIDN

SEQ ID NO: 598 - protein, 6 aa, synthetic construct
SEQIDN

SEQ ID NO: 599 - protein, 6 aa, synthetic construct
SEQIDN

SEQ ID NO: 600 - protein, 6 aa, synthetic construct
SEQIDN

SEQ ID NO: 601 - protein, 6 aa, synthetic construct
SEQIDN

SEQ ID NO: 602 - protein, 6 aa, synthetic construct
SEQIDN

SEQ ID NO: 603 - protein, 6 aa, synthetic construct
SEQIDN

SEQ ID NO: 604 - protein, 6 aa, synthetic construct
SEQIDN

SEQ ID NO: 605 - protein, 6 aa, synthetic construct
SEQIDN

SEQ ID NO: 606 - protein, 6 aa, synthetic construct
SEQIDN

SEQ ID NO: 607 - protein, 6 aa, synthetic construct
SEQIDN

SEQ ID NO: 608 - protein, 6 aa, synthetic construct
SEQIDN

SEQ ID NO: 609 - protein, 6 aa, synthetic construct
SEQIDN

SEQ ID NO: 610 - protein, 6 aa, synthetic construct
SEQIDN

SEQ ID NO: 611 - protein, 6 aa, synthetic construct
SEQIDN

SEQ ID NO: 612 - protein, 6 aa, synthetic construct
SEQIDN

SEQ ID NO: 613 - protein, 6 aa, synthetic construct
SEQIDN

SEQ ID NO: 614 - protein, 6 aa, synthetic construct
SEQIDN

SEQ ID NO: 615 - protein, 6 aa, synthetic construct
SEQIDN

SEQ ID NO: 616 - protein, 6 aa, synthetic construct
SEQIDN

SEQ ID NO: 617 - protein, 6 aa, synthetic construct
SEQIDN

SEQ ID NO: 618 - protein, 6 aa, synthetic construct
SEQIDN

SEQ ID NO: 619 - protein, 6 aa, synthetic construct
SEQIDN

SEQ ID NO: 620 - protein, 6 aa, synthetic construct
SEQIDN

SEQ ID NO: 621 - protein, 6 aa, synthetic construct
SEQIDN

SEQ ID NO: 622 - protein, 6 aa, synthetic construct
SEQIDN

SEQ ID NO: 623 - protein, 6 aa, synthetic construct
SEQIDN

SEQ ID NO: 624 - protein, 6 aa, synthetic construct
SEQIDN

SEQ ID NO: 625 - protein, 6 aa, synthetic construct
SEQIDN

SEQ ID NO: 626 - protein, 6 aa, synthetic construct
SEQIDN

SEQ ID NO: 627 - protein, 6 aa, synthetic construct
SEQIDN

SEQ ID NO: 628 - protein, 6 aa, synthetic construct
SEQIDN

SEQ ID NO: 629 - protein, 6 aa, synthetic construct
SEQIDN

SEQ ID NO: 630 - protein, 6 aa, synthetic construct
SEQIDN

SEQ ID NO: 631 - protein, 6 aa, synthetic construct
SEQIDN

SEQ ID NO: 632 - protein, 6 aa, synthetic construct
SEQIDN

SEQ ID NO: 633 - protein, 6 aa, synthetic construct
SEQIDN

SEQ ID NO: 634 - protein, 6 aa, synthetic construct
SEQIDN

SEQ ID NO: 635 - protein, 6 aa, synthetic construct
SEQIDN

SEQ ID NO: 636 - protein, 6 aa, synthetic construct
SEQIDN

SEQ ID NO: 637 - protein, 6 aa, synthetic construct
SEQIDN

SEQ ID NO: 638 - protein, 7 aa, synthetic construct
SSYLNWY

SEQ ID NO: 639 - protein, 7 aa, synthetic construct
VTYLNWY

SEQ ID NO: 640 - protein, 7 aa, synthetic construct
STYVNWY

SEQ ID NO: 641 - protein, 7 aa, synthetic construct
VSYLNWY

SEQ ID NO: 642 - protein, 7 aa, synthetic construct
ITYVNWY

SEQ ID NO: 643 - protein, 7 aa, synthetic construct
LTYLNWY

SEQ ID NO: 644 - protein, 7 aa, synthetic construct
VTYVNWY

SEQ ID NO: 645 - protein, 7 aa, synthetic construct
LSYLNWY

SEQ ID NO: 646 - protein, 7 aa, synthetic construct
SSYLNWY

SEQ ID NO: 647 - protein, 7 aa, synthetic construct
LTYLNWY

SEQ ID NO: 648 - protein, 7 aa, synthetic construct
ISYLNWY

SEQ ID NO: 649 - protein, 7 aa, synthetic construct
LTYLNWY

SEQ ID NO: 650 - protein, 7 aa, synthetic construct
LTYLNWY

SEQ ID NO: 651 - protein, 7 aa, synthetic construct
LTYLNWY

SEQ ID NO: 652 - protein, 7 aa, synthetic construct
LTYLNWY

SEQ ID NO: 653 - protein, 7 aa, synthetic construct
LSYVNWY

SEQ ID NO: 654 - protein, 7 aa, synthetic construct
LSYLNWY

SEQ ID NO: 655 - protein, 7 aa, synthetic construct
LSYVNWY

SEQ ID NO: 656 - protein, 7 aa, synthetic construct
LSYVNWY

SEQ ID NO: 657 - protein, 7 aa, synthetic construct
LTYLNWY

SEQ ID NO: 658 - protein, 7 aa, synthetic construct
VSYVNWY

SEQ ID NO: 659 - protein, 7 aa, synthetic construct
LTYLNWY

SEQ ID NO: 660 - protein, 7 aa, synthetic construct
LTYVNWY

SEQ ID NO: 661 - protein, 7 aa, synthetic construct
VSYLNWY

SEQ ID NO: 662 - protein, 7 aa, synthetic construct
VSYVNWY

SEQ ID NO: 663 - protein, 7 aa, synthetic construct
LSYVNWY

SEQ ID NO: 664 - protein, 7 aa, synthetic construct
VSYVNWY

SEQ ID NO: 665 - protein, 7 aa, synthetic construct
LTYLNWY

SEQ ID NO: 666 - protein, 7 aa, synthetic construct
ITYVNWY

SEQ ID NO: 667 - protein, 7 aa, synthetic construct
LSYVNWY

SEQ ID NO: 668 - protein, 7 aa, synthetic construct
SSYLNWY

SEQ ID NO: 669 - protein, 7 aa, synthetic construct
LSYLNWY

SEQ ID NO: 670 - protein, 7 aa, synthetic construct
LSYVNWY

SEQ ID NO: 671 - protein, 7 aa, synthetic construct
LTYLNWY

SEQ ID NO: 672 - protein, 7 aa, synthetic construct
LSYVNWY

SEQ ID NO: 673 - protein, 7 aa, synthetic construct
VSYVNWY

SEQ ID NO: 674 - protein, 7 aa, synthetic construct
LTYLNWY

SEQ ID NO: 675 - protein, 7 aa, synthetic construct
VSYVNWY

SEQ ID NO: 676 - protein, 7 aa, synthetic construct
LSYVNWY

SEQ ID NO: 677 - protein, 7 aa, synthetic construct
LSYVNWY

SEQ ID NO: 678 - protein, 7 aa, synthetic construct
VSYLNWY

SEQ ID NO: 679 - protein, 7 aa, synthetic construct
LSYLNWY

SEQ ID NO: 680 - protein, 7 aa, synthetic construct
LSYVNWY

SEQ ID NO: 681 - protein, 7 aa, synthetic construct
VSYVNWY

SEQ ID NO: 682 - protein, 7 aa, synthetic construct
LTYVNWY

SEQ ID NO: 683 - protein, 7 aa, synthetic construct
LSYVNWY

SEQ ID NO: 684 - protein, 7 aa, synthetic construct
LSYLNWY

SEQ ID NO: 685 - protein, 7 aa, synthetic construct
LTYLNWY

SEQ ID NO: 686 - protein, 7 aa, synthetic construct
LTYVNWY

SEQ ID NO: 687 - protein, 7 aa, synthetic construct
LTYLNWY

SEQ ID NO: 688 - protein, 7 aa, synthetic construct
LTYVNWY

SEQ ID NO: 689 - protein, 7 aa, synthetic construct
LTYLNWY

SEQ ID NO: 690 - protein, 7 aa, synthetic construct
LTYLNWY

SEQ ID NO: 691 - protein, 7 aa, synthetic construct
VSYVNWY

SEQ ID NO: 692 - protein, 7 aa, synthetic construct
LSYLNWY

SEQ ID NO: 693 - protein, 7 aa, synthetic construct
LSYVNWY

SEQ ID NO: 694 - protein, 7 aa, synthetic construct
LTYVNWY

SEQ ID NO: 695 - protein, 7 aa, synthetic construct
LSYVNWY

SEQ ID NO: 696 - protein, 7 aa, synthetic construct
LSYVNWY

SEQ ID NO: 697 - protein, 7 aa, synthetic construct
LTYLNWY

SEQ ID NO: 698 - protein, 7 aa, synthetic construct
LSYLNWY

SEQ ID NO: 699 - protein, 7 aa, synthetic construct
ISYLNWY

SEQ ID NO: 700 - protein, 7 aa, synthetic construct
LSYVNWY

SEQ ID NO: 701 - protein, 7 aa, synthetic construct
LSYVNWY

SEQ ID NO: 702 - protein, 7 aa, synthetic construct
LSYLNWY

SEQ ID NO: 703 - protein, 7 aa, synthetic construct
LTYLNWY

SEQ ID NO: 704 - protein, 7 aa, synthetic construct
SSYVNWY

SEQ ID NO: 705 - protein, 7 aa, synthetic construct
LSYLNWY

SEQ ID NO: 706 - protein, 7 aa, synthetic construct
LTYLNWY

SEQ ID NO: 707 - protein, 7 aa, synthetic construct
LTYVNWY

SEQ ID NO: 708 - protein, 7 aa, synthetic construct
ITYLNWY

SEQ ID NO: 709 - protein, 10 aa, synthetic construct
LLIYAASSLQ

SEQ ID NO: 710 - protein, 10 aa, synthetic construct
LLIYAATSRA

SEQ ID NO: 711 - protein, 10 aa, synthetic construct
LLIYAVTSLH

SEQ ID NO: 712 - protein, 10 aa, synthetic construct
LVIYAATSRA

SEQ ID NO: 713 - protein, 10 aa, synthetic construct
LLIYAATSRA

SEQ ID NO: 714 - protein, 10 aa, synthetic construct
LVIYAATSRA

SEQ ID NO: 715 - protein, 10 aa, synthetic construct
LLIYAATSRA

SEQ ID NO: 716 - protein, 10 aa, synthetic construct
LLIYAATSLA

SEQ ID NO: 717 - protein, 10 aa, synthetic construct
LLIYAASSLQ

SEQ ID NO: 718 - protein, 10 aa, synthetic construct
LVIYAATSRH

SEQ ID NO: 719 - protein, 10 aa, synthetic construct
LVIYAATSRA

SEQ ID NO: 720 - protein, 10 aa, synthetic construct
LVIYAATSRH

SEQ ID NO: 721 - protein, 10 aa, synthetic construct
LLIYAATSRH

SEQ ID NO: 722 - protein, 10 aa, synthetic construct
LVIYATTSRH

SEQ ID NO: 723 - protein, 10 aa, synthetic construct
LVIYAATSLH

SEQ ID NO: 724 - protein, 10 aa, synthetic construct
LLIYATTSRH

SEQ ID NO: 725 - protein, 10 aa, synthetic construct
LLIYATTSRA

SEQ ID NO: 726 - protein, 10 aa, synthetic construct
LLIYAATSRA

SEQ ID NO: 727 - protein, 10 aa, synthetic construct
LVIYAATSRA

SEQ ID NO: 728 - protein, 10 aa, synthetic construct
LLIYAATSRA

SEQ ID NO: 729 - protein, 10 aa, synthetic construct
LVIYAATSRH

SEQ ID NO: 730 - protein, 10 aa, synthetic construct
LLIYAATSRH

SEQ ID NO: 731 - protein, 10 aa, synthetic construct
LLIYAATSRH

SEQ ID NO: 732 - protein, 10 aa, synthetic construct
LVIYAATSRA

SEQ ID NO: 733 - protein, 10 aa, synthetic construct
LLIYAATSRA

SEQ ID NO: 734 - protein, 10 aa, synthetic construct
LLIYAATSRA

SEQ ID NO: 735 - protein, 10 aa, synthetic construct
LVIYAATSRA

SEQ ID NO: 736 - protein, 10 aa, synthetic construct
LLIYAATSRA

SEQ ID NO: 737 - protein, 10 aa, synthetic construct
LLIYATTSRA

SEQ ID NO: 738 - protein, 10 aa, synthetic construct
LVIYAATSRH

SEQ ID NO: 739 - protein, 10 aa, synthetic construct
LLIYAASSLQ

SEQ ID NO: 740 - protein, 10 aa, synthetic construct
LVIYAATSRA

SEQ ID NO: 741 - protein, 10 aa, synthetic construct
LVIYAATSLH

SEQ ID NO: 742 - protein, 10 aa, synthetic construct
LLIYAATSRA

SEQ ID NO: 743 - protein, 10 aa, synthetic construct
LVIYAVTSRH

SEQ ID NO: 744 - protein, 10 aa, synthetic construct
LVIYAATSLA

SEQ ID NO: 745 - protein, 10 aa, synthetic construct
LLIYAATSRH

SEQ ID NO: 746 - protein, 10 aa, synthetic construct
LVIYAATSLA

SEQ ID NO: 747 - protein, 10 aa, synthetic construct
LLIYAATSRA

SEQ ID NO: 748 - protein, 10 aa, synthetic construct
LLIYAATSRA

SEQ ID NO: 749 - protein, 10 aa, synthetic construct
LVIYAATSRH

SEQ ID NO: 750 - protein, 10 aa, synthetic construct
LVIYAATSRA

SEQ ID NO: 751 - protein, 10 aa, synthetic construct
LLIYAATSLA

SEQ ID NO: 752 - protein, 10 aa, synthetic construct
LVIYAATSRA

SEQ ID NO: 753 - protein, 10 aa, synthetic construct
LLIYAATSRH

SEQ ID NO: 754 - protein, 10 aa, synthetic construct
LLIYAATSRA

SEQ ID NO: 755 - protein, 10 aa, synthetic construct
LLIYAASSLQ

SEQ ID NO: 756 - protein, 10 aa, synthetic construct
LLIYAATSRA

SEQ ID NO: 757 - protein, 10 aa, synthetic construct
LVIYAATSLA

SEQ ID NO: 758 - protein, 10 aa, synthetic construct
LLIYAATSRA

SEQ ID NO: 759 - protein, 10 aa, synthetic construct
LLIYAASSLQ

SEQ ID NO: 760 - protein, 10 aa, synthetic construct
LLIYAASSLQ

SEQ ID NO: 761 - protein, 10 aa, synthetic construct
LLIYAATSLA

SEQ ID NO: 762 - protein, 10 aa, synthetic construct
LVIYAATSRA

SEQ ID NO: 763 - protein, 10 aa, synthetic construct
LLIYAATSRA

SEQ ID NO: 764 - protein, 10 aa, synthetic construct
LVIYAATSRA

SEQ ID NO: 765 - protein, 10 aa, synthetic construct
LLIYAATSRA

SEQ ID NO: 766 - protein, 10 aa, synthetic construct
LLIYAATSLA

SEQ ID NO: 767 - protein, 10 aa, synthetic construct
LLIYAATSRA

SEQ ID NO: 768 - protein, 10 aa, synthetic construct
LLIYAATSRA

SEQ ID NO: 769 - protein, 10 aa, synthetic construct
LLIYAASSLQ

SEQ ID NO: 770 - protein, 10 aa, synthetic construct
LLIYAATSLA

SEQ ID NO: 771 - protein, 10 aa, synthetic construct
LLIYAATSLA

SEQ ID NO: 772 - protein, 10 aa, synthetic construct
LVIYAATSRA

SEQ ID NO: 773 - protein, 10 aa, synthetic construct
LLIYAATSRA

SEQ ID NO: 774 - protein, 10 aa, synthetic construct
LLIYAASSLQ

SEQ ID NO: 775 - protein, 10 aa, synthetic construct
LLIYAVTSRA

SEQ ID NO: 776 - protein, 10 aa, synthetic construct
LVIYAATSRA

SEQ ID NO: 777 - protein, 10 aa, synthetic construct
LVIYYANNRP

SEQ ID NO: 778 - protein, 10 aa, synthetic construct
LLIYAVTSRA

SEQ ID NO: 779 - protein, 10 aa, synthetic construct
LVIYAATSRA

SEQ ID NO: 780 - protein, 8 aa, synthetic construct
QQSYSTPL

SEQ ID NO: 781 - protein, 8 aa, synthetic construct
QQSYSSPL

SEQ ID NO: 782 - protein, 8 aa, synthetic construct
QQSYDNPL

SEQ ID NO: 783 - protein, 8 aa, synthetic construct
QQSYDSPL

SEQ ID NO: 784 - protein, 8 aa, synthetic construct
QQSYDTPL

SEQ ID NO: 785 - protein, 8 aa, synthetic construct
QQSYNTPL

SEQ ID NO: 786 - protein, 8 aa, synthetic construct
QQSYELPL

SEQ ID NO: 787 - protein, 8 aa, synthetic construct
QQSDSTPL

SEQ ID NO: 788 - protein, 8 aa, synthetic construct
QQSYETPL

SEQ ID NO: 789 - protein, 8 aa, synthetic construct
QQSYDSPL

SEQ ID NO: 790 - protein, 8 aa, synthetic construct
QQSYDSPL

SEQ ID NO: 791 - protein, 8 aa, synthetic construct
QQSDNSPL

SEQ ID NO: 792 - protein, 8 aa, synthetic construct
QQSDDNPL

SEQ ID NO: 793 - protein, 8 aa, synthetic construct
QQSYESPL

SEQ ID NO: 794 - protein, 8 aa, synthetic construct
QQSYDTPL

SEQ ID NO: 795 - protein, 8 aa, synthetic construct
QQSYESPL

SEQ ID NO: 796 - protein, 8 aa, synthetic construct
QQSYDNPL

SEQ ID NO: 797 - protein, 8 aa, synthetic construct
QQSYELPL

SEQ ID NO: 798 - protein, 8 aa, synthetic construct
QQSNELPL

SEQ ID NO: 799 - protein, 8 aa, synthetic construct
QQSYDTPL

SEQ ID NO: 800 - protein, 8 aa, synthetic construct
QQSYDLPL

SEQ ID NO: 801 - protein, 8 aa, synthetic construct
QQSDDSPL

SEQ ID NO: 802 - protein, 8 aa, synthetic construct
QQSYNLPL

SEQ ID NO: 803 - protein, 8 aa, synthetic construct
QQSYENPL

SEQ ID NO: 804 - protein, 8 aa, synthetic construct
QQSYDLPL

SEQ ID NO: 805 - protein, 8 aa, synthetic construct
QQSYSTPL

SEQ ID NO: 806 - protein, 8 aa, synthetic construct
QQSYENPL

SEQ ID NO: 807 - protein, 8 aa, synthetic construct
QQSDSNPL

SEQ ID NO: 808 - protein, 8 aa, synthetic construct
QQSYDLPL

SEQ ID NO: 809 - protein, 8 aa, synthetic construct
QQSYENPL

SEQ ID NO: 810 - protein, 8 aa, synthetic construct
QQSYSTPL

SEQ ID NO: 811 - protein, 8 aa, synthetic construct
QQSYSSPL

SEQ ID NO: 812 - protein, 8 aa, synthetic construct
QQSYETPL

SEQ ID NO: 813 - protein, 8 aa, synthetic construct
QQSDNTPL

SEQ ID NO: 814 - protein, 8 aa, synthetic construct
QQSYSNPL

SEQ ID NO: 815 - protein, 8 aa, synthetic construct
QQSYDLPL

SEQ ID NO: 816 - protein, 8 aa, synthetic construct
QQSYDLPL

SEQ ID NO: 817 - protein, 8 aa, synthetic construct
QQSYDLPL

SEQ ID NO: 818 - protein, 8 aa, synthetic construct
QQSYESPL

SEQ ID NO: 819 - protein, 8 aa, synthetic construct
QQSYDSPL

SEQ ID NO: 820 - protein, 8 aa, synthetic construct
QQSYDLPL

SEQ ID NO: 821 - protein, 8 aa, synthetic construct
QQSYDTPL

SEQ ID NO: 822 - protein, 8 aa, synthetic construct
QQSYENPL

SEQ ID NO: 823 - protein, 8 aa, synthetic construct
QQSYETPL

SEQ ID NO: 824 - protein, 8 aa, synthetic construct
QQSYSSPL

SEQ ID NO: 825 - protein, 8 aa, synthetic construct
QQSYENPL

SEQ ID NO: 826 - protein, 8 aa, synthetic construct
QQSDSLPL

SEQ ID NO: 827 - protein, 8 aa, synthetic construct
QQSDNLPL

SEQ ID NO: 828 - protein, 8 aa, synthetic construct
QQSYNNPL

SEQ ID NO: 829 - protein, 8 aa, synthetic construct
QQSYELPL

SEQ ID NO: 830 - protein, 8 aa, synthetic construct
QQSYDTPL

SEQ ID NO: 831 - protein, 8 aa, synthetic construct
QQSYDSPL

SEQ ID NO: 832 - protein, 8 aa, synthetic construct
QQSDSNPL

SEQ ID NO: 833 - protein, 8 aa, synthetic construct
QQSYSLPL

SEQ ID NO: 834 - protein, 8 aa, synthetic construct
QQSYESPL

SEQ ID NO: 835 - protein, 8 aa, synthetic construct
QQSYDLPL

SEQ ID NO: 836 - protein, 8 aa, synthetic construct
QQSYDNPL

SEQ ID NO: 837 - protein, 8 aa, synthetic construct
QQSYNLPL

SEQ ID NO: 838 - protein, 8 aa, synthetic construct
QQSYDTPL

SEQ ID NO: 839 - protein, 8 aa, synthetic construct
QQSDSNPL

SEQ ID NO: 840 - protein, 8 aa, synthetic construct
QQSYDSPL

SEQ ID NO: 841 - protein, 8 aa, synthetic construct
QQSYESPL

SEQ ID NO: 842 - protein, 8 aa, synthetic construct
QQSYDTPL

SEQ ID NO: 843 - protein, 8 aa, synthetic construct
QQSYESPL

SEQ ID NO: 844 - protein, 8 aa, synthetic construct
QQSYELPL

SEQ ID NO: 845 - protein, 8 aa, synthetic construct
QQSYELPL

SEQ ID NO: 846 - protein, 8 aa, synthetic construct
QQSYSTPL

SEQ ID NO: 847 - protein, 8 aa, synthetic construct
QQSYSNPL

SEQ ID NO: 848 - protein, 8 aa, synthetic construct
QQSYSNPL

SEQ ID NO: 849 - protein, 8 aa, synthetic construct
QQSYDTPL

SEQ ID NO: 850 - protein, 8 aa, synthetic construct
QQSYESPL

SEQ ID NO: 851 - protein, 6 aa, synthetic construct
SSYSMN

SEQ ID NO: 852 - protein, 6 aa, synthetic construct
SSYGMH

SEQ ID NO: 853 - protein, 6 aa, synthetic construct
DSYSMN

SEQ ID NO: 854 - protein, 6 aa, synthetic construct
DSYSMN

SEQ ID NO: 855 - protein, 6 aa, synthetic construct
SSYSMH

SEQ ID NO: 856 - protein, 6 aa, synthetic construct
SSYGMN

SEQ ID NO: 857 - protein, 6 aa, synthetic construct
SSYSMN

SEQ ID NO: 858 - protein, 6 aa, synthetic construct
DDYSMN

SEQ ID NO: 859 - protein, 6 aa, synthetic construct
SSYGMN

SEQ ID NO: 860 - protein, 6 aa, synthetic construct
SSYGMN

SEQ ID NO: 861 - protein, 6 aa, synthetic construct
SSYGMH

SEQ ID NO: 862 - protein, 6 aa, synthetic construct
SSYGMN

SEQ ID NO: 863 - protein, 6 aa, synthetic construct
DDYSMN

SEQ ID NO: 864 - protein, 6 aa, synthetic construct
DSYGMN

SEQ ID NO: 865 - protein, 6 aa, synthetic construct
SSYSMN

SEQ ID NO: 866 - protein, 6 aa, synthetic construct
DSYSMH

SEQ ID NO: 867 - protein, 6 aa, synthetic construct
SDYSMN

SEQ ID NO: 868 - protein, 6 aa, synthetic construct
DSYGMN

SEQ ID NO: 869 - protein, 6 aa, synthetic construct
SDYSMN

SEQ ID NO: 870 - protein, 6 aa, synthetic construct
SSYGMH

SEQ ID NO: 871 - protein, 6 aa, synthetic construct
DSYSMH

SEQ ID NO: 872 - protein, 6 aa, synthetic construct
SSYGMH

SEQ ID NO: 873 - protein, 6 aa, synthetic construct
SSYGMN

SEQ ID NO: 874 - protein, 6 aa, synthetic construct
SSYGMN

SEQ ID NO: 875 - protein, 6 aa, synthetic construct
SDYSMN

SEQ ID NO: 876 - protein, 6 aa, synthetic construct
DDYGMN

SEQ ID NO: 877 - protein, 6 aa, synthetic construct
SSYGMN

SEQ ID NO: 878 - protein, 6 aa, synthetic construct
DDYSMH

SEQ ID NO: 879 - protein, 6 aa, synthetic construct
SSYSMN

SEQ ID NO: 880 - protein, 6 aa, synthetic construct
SSYSMH

SEQ ID NO: 881 - protein, 6 aa, synthetic construct
DSYGMH

SEQ ID NO: 882 - protein, 6 aa, synthetic construct
DSYGMH

SEQ ID NO: 883 - protein, 6 aa, synthetic construct
DSYGMN

SEQ ID NO: 884 - protein, 6 aa, synthetic construct
SSYGMN

SEQ ID NO: 885 - protein, 6 aa, synthetic construct
SDYSMN

SEQ ID NO: 886 - protein, 6 aa, synthetic construct
SDYGMN

SEQ ID NO: 887 - protein, 6 aa, synthetic construct
SSYSMN

SEQ ID NO: 888 - protein, 6 aa, synthetic construct
SSYSMN

SEQ ID NO: 889 - protein, 6 aa, synthetic construct
SSYGMH

SEQ ID NO: 890 - protein, 6 aa, synthetic construct
SSYSMN

SEQ ID NO: 891 - protein, 6 aa, synthetic construct
DDYSMN

SEQ ID NO: 892 - protein, 6 aa, synthetic construct
SSYSMN

SEQ ID NO: 893 - protein, 6 aa, synthetic construct
SSYSMN

SEQ ID NO: 894 - protein, 6 aa, synthetic construct
SDYSMN

SEQ ID NO: 895 - protein, 6 aa, synthetic construct
SSYSMN

SEQ ID NO: 896 - protein, 6 aa, synthetic construct
SSYSMN

SEQ ID NO: 897 - protein, 6 aa, synthetic construct
DSYSMN

SEQ ID NO: 898 - protein, 6 aa, synthetic construct
SSYSMN

SEQ ID NO: 899 - protein, 6 aa, synthetic construct
SDYSMN

SEQ ID NO: 900 - protein, 6 aa, synthetic construct
SSYSMN

SEQ ID NO: 901 - protein, 6 aa, synthetic construct
SSYGMN

SEQ ID NO: 902 - protein, 6 aa, synthetic construct
SSYGMN

SEQ ID NO: 903 - protein, 6 aa, synthetic construct
DSYGMN

SEQ ID NO: 904 - protein, 6 aa, synthetic construct
SDYSMN

SEQ ID NO: 905 - protein, 6 aa, synthetic construct
SDYSMN

SEQ ID NO: 906 - protein, 6 aa, synthetic construct
SSYSMN

SEQ ID NO: 907 - protein, 6 aa, synthetic construct
DDYSMN

SEQ ID NO: 908 - protein, 6 aa, synthetic construct
DSYSMN

SEQ ID NO: 909 - protein, 6 aa, synthetic construct
SSYSMN

SEQ ID NO: 910 - protein, 6 aa, synthetic construct
DSYGMN

SEQ ID NO: 911 - protein, 6 aa, synthetic construct
SSYSMN

SEQ ID NO: 912 - protein, 6 aa, synthetic construct
SSYSMN

SEQ ID NO: 913 - protein, 6 aa, synthetic construct
SDYSMN

SEQ ID NO: 914 - protein, 6 aa, synthetic construct
DSYSMN

SEQ ID NO: 915 - protein, 6 aa, synthetic construct
SSYSMN

SEQ ID NO: 916 - protein, 6 aa, synthetic construct
SSYSMN

SEQ ID NO: 917 - protein, 6 aa, synthetic construct
SDYSMN

SEQ ID NO: 918 - protein, 6 aa, synthetic construct
SSYSMN

SEQ ID NO: 919 - protein, 6 aa, synthetic construct
SSYSMN

SEQ ID NO: 920 - protein, 6 aa, synthetic construct
SDYSMN

SEQ ID NO: 921 - protein, 6 aa, synthetic construct
SSYGMH

SEQ ID NO: 922 - protein, 6 aa, synthetic construct
SSYGMH

SEQ ID NO: 923 - protein, 6 aa, synthetic construct
SSYSMN

SEQ ID NO: 924 - protein, 6 aa, synthetic construct
DSYSMN

SEQ ID NO: 925 - protein, 6 aa, synthetic construct
SSYSMN

SEQ ID NO: 926 - protein, 6 aa, synthetic construct
SSYSMN

SEQ ID NO: 927 - protein, 6 aa, synthetic construct
SSYSMN

SEQ ID NO: 928 - protein, 6 aa, synthetic construct
SSYSMN

SEQ ID NO: 929 - protein, 6 aa, synthetic construct
SDYGMN

SEQ ID NO: 930 - protein, 6 aa, synthetic construct
SSYSMN

SEQ ID NO: 931 - protein, 6 aa, synthetic construct
SSYSMN

SEQ ID NO: 932 - protein, 6 aa, synthetic construct
DSYGMN

SEQ ID NO: 933 - protein, 6 aa, synthetic construct
SSYSMN

SEQ ID NO: 934 - protein, 6 aa, synthetic construct
SSYSMN

SEQ ID NO: 935 - protein, 6 aa, synthetic construct
DSYSMN

SEQ ID NO: 936 - protein, 6 aa, synthetic construct
SSYSMN

SEQ ID NO: 937 - protein, 6 aa, synthetic construct
SSYGMN

SEQ ID NO: 938 - protein, 6 aa, synthetic construct
SSYSMN

SEQ ID NO: 939 - protein, 6 aa, synthetic construct
SSYSMN

SEQ ID NO: 940 - protein, 6 aa, synthetic construct
SSYSMN

SEQ ID NO: 941 - protein, 6 aa, synthetic construct
SSYSMN

SEQ ID NO: 942 - protein, 6 aa, synthetic construct
SSYSMN

SEQ ID NO: 943 - protein, 6 aa, synthetic construct
SSYSMN

SEQ ID NO: 944 - protein, 13 aa, synthetic construct
WVASINYNGGYKS

SEQ ID NO: 945 - protein, 13 aa, synthetic construct
WVASINYNGGYTS

SEQ ID NO: 946 - protein, 13 aa, synthetic construct
WVSNINYNGGYKG

SEQ ID NO: 947 - protein, 13 aa, synthetic construct
WVANINYNGGYKG

SEQ ID NO: 948 - protein, 13 aa, synthetic construct
WVASINYNGGYTS

SEQ ID NO: 949 - protein, 13 aa, synthetic construct
WVSSINYNSGYKS

SEQ ID NO: 950 - protein, 13 aa, synthetic construct
WVAGINYNGGYTG

SEQ ID NO: 951 - protein, 13 aa, synthetic construct
WVSSINYNGGYKS

SEQ ID NO: 952 - protein, 13 aa, synthetic construct
WVASINYNGGYTS

SEQ ID NO: 953 - protein, 13 aa, synthetic construct
WVAGINYNGGYTS

SEQ ID NO: 954 - protein, 13 aa, synthetic construct
WVSNINYNGGYKS

SEQ ID NO: 955 - protein, 13 aa, synthetic construct
WVSSINYNGGYTS

SEQ ID NO: 956 - protein, 13 aa, synthetic construct
WVASINYNSGYTG

SEQ ID NO: 957 - protein, 13 aa, synthetic construct
WVSSINYNSGYKG

SEQ ID NO: 958 - protein, 13 aa, synthetic construct
WVANINYNGGYTG

SEQ ID NO: 959 - protein, 13 aa, synthetic construct
WVAGINYNGGYTS

SEQ ID NO: 960 - protein, 13 aa, synthetic construct
WVSSINYNGGYKS

SEQ ID NO: 961 - protein, 13 aa, synthetic construct
WVASINYNGGYKS

SEQ ID NO: 962 - protein, 13 aa, synthetic construct
WVSSINYNGGYKG

SEQ ID NO: 963 - protein, 13 aa, synthetic construct
WVASINYNGGYTS

SEQ ID NO: 964 - protein, 13 aa, synthetic construct
WVAGINYNGGYTS

SEQ ID NO: 965 - protein, 13 aa, synthetic construct
WVASINYNSGYKS

SEQ ID NO: 966 - protein, 13 aa, synthetic construct
WVASINYNGGYTG

SEQ ID NO: 967 - protein, 13 aa, synthetic construct
WVSGINYNSGYKS

SEQ ID NO: 968 - protein, 13 aa, synthetic construct
WVSSINYNSGYKS

SEQ ID NO: 969 - protein, 13 aa, synthetic construct
WVSNINYNGGYTG

SEQ ID NO: 970 - protein, 13 aa, synthetic construct
WVSSINYNGGYTS

SEQ ID NO: 971 - protein, 13 aa, synthetic construct
WVANINYNSGYTG

SEQ ID NO: 972 - protein, 13 aa, synthetic construct
WVSGINYNSGYTS

SEQ ID NO: 973 - protein, 13 aa, synthetic construct
WVSSINYNGGYTS

SEQ ID NO: 974 - protein, 13 aa, synthetic construct
WVANINYNGGYKS

SEQ ID NO: 975 - protein, 13 aa, synthetic construct
WVASINYNGGYTS

SEQ ID NO: 976 - protein, 13 aa, synthetic construct
WVANINYNGGYKG

SEQ ID NO: 977 - protein, 13 aa, synthetic construct
WVANINYNGGYKG

SEQ ID NO: 978 - protein, 13 aa, synthetic construct
WVASINYNGGYKG

SEQ ID NO: 979 - protein, 13 aa, synthetic construct
WVANINYNGGYKS

SEQ ID NO: 980 - protein, 13 aa, synthetic construct
WVASINYNSGYTG

SEQ ID NO: 981 - protein, 13 aa, synthetic construct
WVSGINYNGGYKS

SEQ ID NO: 982 - protein, 13 aa, synthetic construct
WVAGINYNGGYTS

SEQ ID NO: 983 - protein, 13 aa, synthetic construct
WVAGINYNGGYTS

SEQ ID NO: 984 - protein, 13 aa, synthetic construct
WVSNINYNGGYKS

SEQ ID NO: 985 - protein, 13 aa, synthetic construct
WVAGINYNSGYKS

SEQ ID NO: 986 - protein, 13 aa, synthetic construct
WVAGINYNGGYKS

SEQ ID NO: 987 - protein, 13 aa, synthetic construct
WVANINYNGGYTG

SEQ ID NO: 988 - protein, 13 aa, synthetic construct
WVANINYNGGYKS

SEQ ID NO: 989 - protein, 13 aa, synthetic construct
WVANINYNGGYKS

SEQ ID NO: 990 - protein, 13 aa, synthetic construct
WVSNINYNSGYKG

SEQ ID NO: 991 - protein, 13 aa, synthetic construct
WVASINYNGGYTS

SEQ ID NO: 992 - protein, 13 aa, synthetic construct
WVSGINYNSGYTS

SEQ ID NO: 993 - protein, 13 aa, synthetic construct
WVANINYNGGYKG

SEQ ID NO: 994 - protein, 13 aa, synthetic construct
WVSNINYNGGYKG

SEQ ID NO: 995 - protein, 13 aa, synthetic construct
WVSNINYNGGYTS

SEQ ID NO: 996 - protein, 13 aa, synthetic construct
WVANINYNGGYTG

SEQ ID NO: 997 - protein, 13 aa, synthetic construct
WVANINYNGGYTG

SEQ ID NO: 998 - protein, 13 aa, synthetic construct
WVAGINYNGGYTG

SEQ ID NO: 999 - protein, 13 aa, synthetic construct
WVSNINYNGGYTG

SEQ ID NO: 1000 - protein, 13 aa, synthetic construct
WVANINYNGGYTG

SEQ ID NO: 1001 - protein, 13 aa, synthetic construct
WVSNINYNSGYTG

SEQ ID NO: 1002 - protein, 13 aa, synthetic construct
WVSSINYNGGYTS

SEQ ID NO: 1003 - protein, 13 aa, synthetic construct
WVSNINYNGGYTG

SEQ ID NO: 1004 - protein, 13 aa, synthetic construct
WVAGINYNGGYTS

SEQ ID NO: 1005 - protein, 13 aa, synthetic construct
WVSNINYNSGYKS

SEQ ID NO: 1006 - protein, 13 aa, synthetic construct
WVSGINYNSGYTS

SEQ ID NO: 1007 - protein, 13 aa, synthetic construct
WVSGINYNSGYKS

SEQ ID NO: 1008 - protein, 13 aa, synthetic construct
WVSGINYNGGYTS

SEQ ID NO: 1009 - protein, 13 aa, synthetic construct
WVAGINYNGGYTS

SEQ ID NO: 1010 - protein, 13 aa, synthetic construct
WVSNINYNGGYTS

SEQ ID NO: 1011 - protein, 13 aa, synthetic construct
WVSGINYNGGYKG

SEQ ID NO: 1012 - protein, 13 aa, synthetic construct
WVSSINYNSGYTS

SEQ ID NO: 1013 - protein, 13 aa, synthetic construct
WVSNINYNGGYTS

SEQ ID NO: 1014 - protein, 13 aa, synthetic construct
WVASINYNGGYTS

SEQ ID NO: 1015 - protein, 13 aa, synthetic construct
WVAGINYNGGYTS

SEQ ID NO: 1016 - protein, 13 aa, synthetic construct
WVSGINYNGGYKS

SEQ ID NO: 1017 - protein, 13 aa, synthetic construct
WVSGINYNGGYKS

SEQ ID NO: 1018 - protein, 13 aa, synthetic construct
WVAGINYNGGYTS

SEQ ID NO: 1019 - protein, 13 aa, synthetic construct
WVSGINYNSGYKS

SEQ ID NO: 1020 - protein, 13 aa, synthetic construct
WVSGINYNGGYTS

SEQ ID NO: 1021 - protein, 13 aa, synthetic construct
WVAGINYNGGYTS

SEQ ID NO: 1022 - protein, 13 aa, synthetic construct
WVANINYNGGYKG

SEQ ID NO: 1023 - protein, 13 aa, synthetic construct
WVSSINYNGGYKG

SEQ ID NO: 1024 - protein, 13 aa, synthetic construct
WVAGINYNGGYTS

SEQ ID NO: 1025 - protein, 13 aa, synthetic construct
WVANINYNGGYKG

SEQ ID NO: 1026 - protein, 13 aa, synthetic construct
WVSNINYNSGYKG

SEQ ID NO: 1027 - protein, 13 aa, synthetic construct
WVAGINYNGGYTS

SEQ ID NO: 1028 - protein, 13 aa, synthetic construct
WVAGINYNGGYTS

SEQ ID NO: 1029 - protein, 13 aa, synthetic construct
WVAGINYNGGYTS

SEQ ID NO: 1030 - protein, 13 aa, synthetic construct
WVSSINYNGGYKG

SEQ ID NO: 1031 - protein, 13 aa, synthetic construct
WVSSINYNGGYTS

SEQ ID NO: 1032 - protein, 13 aa, synthetic construct
WVSGINYNGGYTG

SEQ ID NO: 1033 - protein, 13 aa, synthetic construct
WVSGINYNGGYTS

SEQ ID NO: 1034 - protein, 13 aa, synthetic construct
WVAGINYNGGYKS

SEQ ID NO: 1035 - protein, 13 aa, synthetic construct
WVAGINYNSGYKG

SEQ ID NO: 1036 - protein, 13 aa, synthetic construct
WVSGINYNGGYKS

SEQ ID NO: 1037 - protein, 12 aa, synthetic construct
ARGATWHDTHLD

SEQ ID NO: 1038 - protein, 12 aa, synthetic construct
ARGATWHDTHLD

SEQ ID NO: 1039 - protein, 12 aa, synthetic construct
ARGATWHDTHLD

SEQ ID NO: 1040 - protein, 12 aa, synthetic construct
ARGATWHDTHLD

SEQ ID NO: 1041 - protein, 12 aa, synthetic construct
ARGATWHDTHLD

SEQ ID NO: 1042 - protein, 12 aa, synthetic construct
ARGATWHDTHLD

SEQ ID NO: 1043 - protein, 12 aa, synthetic construct
ARGATWHDTHLD

SEQ ID NO: 1044 - protein, 12 aa, synthetic construct
ARGATWHDTHLD

SEQ ID NO: 1045 - protein, 12 aa, synthetic construct
ARGATWHDTHLD

SEQ ID NO: 1046 - protein, 12 aa, synthetic construct
ARGATWHDTHLD

SEQ ID NO: 1047 - protein, 12 aa, synthetic construct
ARGATWHDTHLD

SEQ ID NO: 1048 - protein, 12 aa, synthetic construct
ARGATWHDTHLD

SEQ ID NO: 1049 - protein, 12 aa, synthetic construct
ARGATWHDTHLD

SEQ ID NO: 1050 - protein, 12 aa, synthetic construct
ARGATWHDTHLD

SEQ ID NO: 1051 - protein, 12 aa, synthetic construct
ARGATWHDTHLD

SEQ ID NO: 1052 - protein, 12 aa, synthetic construct
ARGATWHDTHLD

SEQ ID NO: 1053 - protein, 12 aa, synthetic construct
ARGATWHDTHLD

SEQ ID NO: 1054 - protein, 12 aa, synthetic construct
ARGATWHDTHLD

SEQ ID NO: 1055 - protein, 12 aa, synthetic construct
ARGATWHDTHLD

SEQ ID NO: 1056 - protein, 12 aa, synthetic construct
ARGATWHDTHLD

SEQ ID NO: 1057 - protein, 12 aa, synthetic construct
ARGATWHDTHLD

SEQ ID NO: 1058 - protein, 12 aa, synthetic construct
ARGATWHDTHLD

SEQ ID NO: 1059 - protein, 12 aa, synthetic construct
ARGATWHDTHLD

SEQ ID NO: 1060 - protein, 12 aa, synthetic construct
ARGATWHDTHLD

SEQ ID NO: 1061 - protein, 12 aa, synthetic construct
ARGATWHDTHLD

SEQ ID NO: 1062 - protein, 12 aa, synthetic construct
ARGATWHDTHLD

SEQ ID NO: 1063 - protein, 12 aa, synthetic construct
ARGATWHDTHLD

SEQ ID NO: 1064 - protein, 12 aa, synthetic construct
ARGATWHDTHLD

SEQ ID NO: 1065 - protein, 12 aa, synthetic construct
ARGATWHDTALD

SEQ ID NO: 1066 - protein, 12 aa, synthetic construct
ARGATWHDTHLD

SEQ ID NO: 1067 - protein, 12 aa, synthetic construct
ARGATWHDTHLD

SEQ ID NO: 1068 - protein, 12 aa, synthetic construct
ARGATWHDTHLD

SEQ ID NO: 1069 - protein, 12 aa, synthetic construct
ARGATWHDTHLD

SEQ ID NO: 1070 - protein, 12 aa, synthetic construct
ARGATWHDTHLD

SEQ ID NO: 1071 - protein, 12 aa, synthetic construct
ARGATWHDTHLD

SEQ ID NO: 1072 - protein, 12 aa, synthetic construct
ARGATWHDTHLD

SEQ ID NO: 1073 - protein, 12 aa, synthetic construct
ARGATWHDTHLD

SEQ ID NO: 1074 - protein, 12 aa, synthetic construct
ARGATWHDTHLD

SEQ ID NO: 1075 - protein, 12 aa, synthetic construct
ARGATWHDTHLD

SEQ ID NO: 1076 - protein, 12 aa, synthetic construct
ARGATWHDTHLD

SEQ ID NO: 1077 - protein, 12 aa, synthetic construct
ARGATWHDTHLD

SEQ ID NO: 1078 - protein, 12 aa, synthetic construct
ARGATWHDTHLD

SEQ ID NO: 1079 - protein, 12 aa, synthetic construct
ARGATWHDTHLD

SEQ ID NO: 1080 - protein, 12 aa, synthetic construct
ARGATWHDTHLD

SEQ ID NO: 1081 - protein, 12 aa, synthetic construct
ARGATWHDTHLD

SEQ ID NO: 1082 - protein, 12 aa, synthetic construct
ARGATWHDTHLD

SEQ ID NO: 1083 - protein, 12 aa, synthetic construct
ARGATWHDTHLD

SEQ ID NO: 1084 - protein, 12 aa, synthetic construct
ARGATWHDTHLD

SEQ ID NO: 1085 - protein, 12 aa, synthetic construct
ARGATWHDTHLD

SEQ ID NO: 1086 - protein, 12 aa, synthetic construct
ARGATWHDTHLD

SEQ ID NO: 1087 - protein, 12 aa, synthetic construct
ARGATWHDTHLD

SEQ ID NO: 1088 - protein, 12 aa, synthetic construct
ARGATWHDTHLD

SEQ ID NO: 1089 - protein, 12 aa, synthetic construct
ARGATWHDTHLD

SEQ ID NO: 1090 - protein, 12 aa, synthetic construct
ARGATWHDTHLD

SEQ ID NO: 1091 - protein, 12 aa, synthetic construct
ARGATWHDTHLD

SEQ ID NO: 1092 - protein, 12 aa, synthetic construct
ARGATWHDTHLD

SEQ ID NO: 1093 - protein, 12 aa, synthetic construct
ARGATWHDTHLD

SEQ ID NO: 1094 - protein, 12 aa, synthetic construct
ARGATWHDTHLD

SEQ ID NO: 1095 - protein, 12 aa, synthetic construct
ARGATWHDTHLD

SEQ ID NO: 1096 - protein, 12 aa, synthetic construct
ARGATWHDTALD

SEQ ID NO: 1097 - protein, 12 aa, synthetic construct
ARGATWHDTHLD

SEQ ID NO: 1098 - protein, 12 aa, synthetic construct
ARGATWHDTHLD

SEQ ID NO: 1099 - protein, 12 aa, synthetic construct
ARGATWHDTHLD

SEQ ID NO: 1100 - protein, 12 aa, synthetic construct
ARGATWHDTHLD

SEQ ID NO: 1101 - protein, 12 aa, synthetic construct
ARGATWHDTHLD

SEQ ID NO: 1102 - protein, 12 aa, synthetic construct
ARGATWHDTHLD

SEQ ID NO: 1103 - protein, 12 aa, synthetic construct
ARGATWHDTHLD

SEQ ID NO: 1104 - protein, 12 aa, synthetic construct
ARGATWHDTHLD

SEQ ID NO: 1105 - protein, 12 aa, synthetic construct
ARGATWHDTHLD

SEQ ID NO: 1106 - protein, 12 aa, synthetic construct
ARGATWHDTHLD

SEQ ID NO: 1107 - protein, 12 aa, synthetic construct
ARGATWHDTHLD

SEQ ID NO: 1108 - protein, 12 aa, synthetic construct
ARGATWHDTHLD

SEQ ID NO: 1109 - protein, 12 aa, synthetic construct
ARGATWHDTHLD

SEQ ID NO: 1110 - protein, 12 aa, synthetic construct
ARGATWHDTHLD

SEQ ID NO: 1111 - protein, 12 aa, synthetic construct
ARGATWHDTHLD

SEQ ID NO: 1112 - protein, 12 aa, synthetic construct
ARGATWHDTHLD

SEQ ID NO: 1113 - protein, 12 aa, synthetic construct
ARGATWHDTHLD

SEQ ID NO: 1114 - protein, 12 aa, synthetic construct
ARGATWHDTHLD

SEQ ID NO: 1115 - protein, 12 aa, synthetic construct
ARGATWHDTHLD

SEQ ID NO: 1116 - protein, 12 aa, synthetic construct
ARGATWHDTHLD

SEQ ID NO: 1117 - protein, 12 aa, synthetic construct
ARGATWHDTHLD

SEQ ID NO: 1118 - protein, 12 aa, synthetic construct
ARGATWHDTHLD

SEQ ID NO: 1119 - protein, 12 aa, synthetic construct
ARGATWHDTHLD

SEQ ID NO: 1120 - protein, 12 aa, synthetic construct
ARGATWHDTHLD

SEQ ID NO: 1121 - protein, 12 aa, synthetic construct
ARGATWHDTHLD

SEQ ID NO: 1122 - protein, 12 aa, synthetic construct
ARGATWHDTHLD

SEQ ID NO: 1123 - protein, 12 aa, synthetic construct
ARGATWHDTHLD

SEQ ID NO: 1124 - protein, 12 aa, synthetic construct
ARGATWHDTHLD

SEQ ID NO: 1125 - protein, 12 aa, synthetic construct
ARGATWHDTHLD

SEQ ID NO: 1126 - protein, 12 aa, synthetic construct
ARGATWHDTHLD

SEQ ID NO: 1127 - protein, 12 aa, synthetic construct
ARGATWHDTHLD

SEQ ID NO: 1128 - protein, 12 aa, synthetic construct
ARGATWHDTHLD

SEQ ID NO: 1129 - protein, 12 aa, synthetic construct
ARGATWHDTHLD

SEQ ID NO: 1130 - protein, 7 aa, synthetic construct
ITYLNWY

SEQ ID NO: 1131 - protein, 7 aa, synthetic construct
LSYVNWY

SEQ ID NO: 1132 - protein, 7 aa, synthetic construct
STYLNWY

SEQ ID NO: 1133 - protein, 7 aa, synthetic construct
LTYLNWY

SEQ ID NO: 1134 - protein, 7 aa, synthetic construct
VTYLNWY

SEQ ID NO: 1135 - protein, 7 aa, synthetic construct
SSYLNWY

SEQ ID NO: 1136 - protein, 7 aa, synthetic construct
STYLNWY

SEQ ID NO: 1137 - protein, 7 aa, synthetic construct
SSYLNWY

SEQ ID NO: 1138 - protein, 7 aa, synthetic construct
VTYVNWY

SEQ ID NO: 1139 - protein, 7 aa, synthetic construct
LTYVNWY

SEQ ID NO: 1140 - protein, 7 aa, synthetic construct
LSYVNWY

SEQ ID NO: 1141 - protein, 7 aa, synthetic construct
SSYLNWY

SEQ ID NO: 1142 - protein, 7 aa, synthetic construct
LSYVNWY

SEQ ID NO: 1143 - protein, 7 aa, synthetic construct
ISYLNWY

SEQ ID NO: 1144 - protein, 7 aa, synthetic construct
ISYVNWY

SEQ ID NO: 1145 - protein, 7 aa, synthetic construct
LTYLNWY

SEQ ID NO: 1146 - protein, 7 aa, synthetic construct
ISYVNWY

SEQ ID NO: 1147 - protein, 7 aa, synthetic construct
LTYLNWY

SEQ ID NO: 1148 - protein, 7 aa, synthetic construct
LSYVNWY

SEQ ID NO: 1149 - protein, 7 aa, synthetic construct
LTYVNWY

SEQ ID NO: 1150 - protein, 7 aa, synthetic construct
LTYLNWY

SEQ ID NO: 1151 - protein, 7 aa, synthetic construct
LSYVNWY

SEQ ID NO: 1152 - protein, 7 aa, synthetic construct
LSYVNWY

SEQ ID NO: 1153 - protein, 7 aa, synthetic construct
SSYLNWY

SEQ ID NO: 1154 - protein, 7 aa, synthetic construct
ISYLNWY

SEQ ID NO: 1155 - protein, 7 aa, synthetic construct
STYLNWY

SEQ ID NO: 1156 - protein, 7 aa, synthetic construct
LSYVNWY

SEQ ID NO: 1157 - protein, 7 aa, synthetic construct
LSYLNWY

SEQ ID NO: 1158 - protein, 7 aa, synthetic construct
LSYLNWY

SEQ ID NO: 1159 - protein, 7 aa, synthetic construct
VSYVNWY

SEQ ID NO: 1160 - protein, 7 aa, synthetic construct
LTYVNWY

SEQ ID NO: 1161 - protein, 7 aa, synthetic construct
LSYLNWY

SEQ ID NO: 1162 - protein, 7 aa, synthetic construct
ITYLNWY

SEQ ID NO: 1163 - protein, 7 aa, synthetic construct
LTYLNWY

SEQ ID NO: 1164 - protein, 7 aa, synthetic construct
LTYLNWY

SEQ ID NO: 1165 - protein, 7 aa, synthetic construct
LTYLNWY

SEQ ID NO: 1166 - protein, 7 aa, synthetic construct
LTYVNWY

SEQ ID NO: 1167 - protein, 7 aa, synthetic construct
SSYLNWY

SEQ ID NO: 1168 - protein, 7 aa, synthetic construct
LTYVNWY

SEQ ID NO: 1169 - protein, 7 aa, synthetic construct
VSYLNWY

SEQ ID NO: 1170 - protein, 7 aa, synthetic construct
ISYLNWY

SEQ ID NO: 1171 - protein, 7 aa, synthetic construct
LSYVNWY

SEQ ID NO: 1172 - protein, 7 aa, synthetic construct
VTYVNWY

SEQ ID NO: 1173 - protein, 7 aa, synthetic construct
LSYLNWY

SEQ ID NO: 1174 - protein, 7 aa, synthetic construct
LTYVNWY

SEQ ID NO: 1175 - protein, 7 aa, synthetic construct
LSYLNWY

SEQ ID NO: 1176 - protein, 7 aa, synthetic construct
VSYVNWY

SEQ ID NO: 1177 - protein, 7 aa, synthetic construct
ITYLNWY

SEQ ID NO: 1178 - protein, 7 aa, synthetic construct
VTYLNWY

SEQ ID NO: 1179 - protein, 7 aa, synthetic construct
LTYLNWY

SEQ ID NO: 1180 - protein, 7 aa, synthetic construct
STYLNWY

SEQ ID NO: 1181 - protein, 7 aa, synthetic construct
VSYLNWY

SEQ ID NO: 1182 - protein, 7 aa, synthetic construct
LSYLNWY

SEQ ID NO: 1183 - protein, 7 aa, synthetic construct
LSYLNWY

SEQ ID NO: 1184 - protein, 7 aa, synthetic construct
LTYLNWY

SEQ ID NO: 1185 - protein, 7 aa, synthetic construct
LSYVNWY

SEQ ID NO: 1186 - protein, 7 aa, synthetic construct
LTYLNWY

SEQ ID NO: 1187 - protein, 7 aa, synthetic construct
LSYVNWY

SEQ ID NO: 1188 - protein, 7 aa, synthetic construct
SSYLNWY

SEQ ID NO: 1189 - protein, 7 aa, synthetic construct
LSYLNWY

SEQ ID NO: 1190 - protein, 7 aa, synthetic construct
ISYLNWY

SEQ ID NO: 1191 - protein, 7 aa, synthetic construct
VSYVNWY

SEQ ID NO: 1192 - protein, 7 aa, synthetic construct
LTYLNWY

SEQ ID NO: 1193 - protein, 7 aa, synthetic construct
LSYLNWY

SEQ ID NO: 1194 - protein, 7 aa, synthetic construct
ITYLNWY

SEQ ID NO: 1195 - protein, 7 aa, synthetic construct
LTYLNWY

SEQ ID NO: 1196 - protein, 7 aa, synthetic construct
LTYLNWY

SEQ ID NO: 1197 - protein, 7 aa, synthetic construct
LTYLNWY

SEQ ID NO: 1198 - protein, 7 aa, synthetic construct
LTYLNWY

SEQ ID NO: 1199 - protein, 7 aa, synthetic construct
ITYLNWY

SEQ ID NO: 1200 - protein, 7 aa, synthetic construct
LTYLNWY

SEQ ID NO: 1201 - protein, 7 aa, synthetic construct
LSYVNWY

SEQ ID NO: 1202 - protein, 7 aa, synthetic construct
VTYLNWY

SEQ ID NO: 1203 - protein, 7 aa, synthetic construct
LSYLNWY

SEQ ID NO: 1204 - protein, 7 aa, synthetic construct
VTYLNWY

SEQ ID NO: 1205 - protein, 7 aa, synthetic construct
LSYLNWY

SEQ ID NO: 1206 - protein, 7 aa, synthetic construct
ITYLNWY

SEQ ID NO: 1207 - protein, 7 aa, synthetic construct
LTYLNWY

SEQ ID NO: 1208 - protein, 7 aa, synthetic construct
VRYLNWY

SEQ ID NO: 1209 - protein, 7 aa, synthetic construct
VTYLNWY

SEQ ID NO: 1210 - protein, 7 aa, synthetic construct
LSYLNWY

SEQ ID NO: 1211 - protein, 7 aa, synthetic construct
ISYVNWY

SEQ ID NO: 1212 - protein, 7 aa, synthetic construct
ISYLNWY

SEQ ID NO: 1213 - protein, 7 aa, synthetic construct
LSYVNWY

SEQ ID NO: 1214 - protein, 7 aa, synthetic construct
LTYLNWY

SEQ ID NO: 1215 - protein, 7 aa, synthetic construct
LTYLNWY

SEQ ID NO: 1216 - protein, 7 aa, synthetic construct
SSYLNWY

SEQ ID NO: 1217 - protein, 7 aa, synthetic construct
LSYVNWY

SEQ ID NO: 1218 - protein, 7 aa, synthetic construct
LTYLNWY

SEQ ID NO: 1219 - protein, 7 aa, synthetic construct
LTYLNWY

SEQ ID NO: 1220 - protein, 7 aa, synthetic construct
LSYLNWY

SEQ ID NO: 1221 - protein, 7 aa, synthetic construct
LTYLNWY

SEQ ID NO: 1222 - protein, 7 aa, synthetic construct
LTYLNWY

SEQ ID NO: 1223 - protein, 10 aa, synthetic construct
LVIYAATSRA

SEQ ID NO: 1224 - protein, 10 aa, synthetic construct
LLIYAATSRA

SEQ ID NO: 1225 - protein, 10 aa, synthetic construct
LVIYAATSRH

SEQ ID NO: 1226 - protein, 10 aa, synthetic construct
LVIYAATSLA

SEQ ID NO: 1227 - protein, 10 aa, synthetic construct
LLIYAATSLA

SEQ ID NO: 1228 - protein, 10 aa, synthetic construct
LLIYAASSLQ

SEQ ID NO: 1229 - protein, 10 aa, synthetic construct
LLIYAATSRA

SEQ ID NO: 1230 - protein, 10 aa, synthetic construct
LLIYAASSLQ

SEQ ID NO: 1231 - protein, 10 aa, synthetic construct
LLIYAATSRA

SEQ ID NO: 1232 - protein, 10 aa, synthetic construct
LLIYAATSLH

SEQ ID NO: 1233 - protein, 10 aa, synthetic construct
LVIYAATSLA

SEQ ID NO: 1234 - protein, 10 aa, synthetic construct
LLIYAASSLQ

SEQ ID NO: 1235 - protein, 10 aa, synthetic construct
LVIYAATSRA

SEQ ID NO: 1236 - protein, 10 aa, synthetic construct
LLIYAVTSRA

SEQ ID NO: 1237 - protein, 10 aa, synthetic construct
LVIYAATSLH

SEQ ID NO: 1238 - protein, 10 aa, synthetic construct
LLIYAATSLA

SEQ ID NO: 1239 - protein, 10 aa, synthetic construct
LVIYAATSLA

SEQ ID NO: 1240 - protein, 10 aa, synthetic construct
LLIYAATSLA

SEQ ID NO: 1241 - protein, 10 aa, synthetic construct
LVIYAATSRA

SEQ ID NO: 1242 - protein, 10 aa, synthetic construct
LLIYAASSLQ

SEQ ID NO: 1243 - protein, 10 aa, synthetic construct
LLIYAATSLA

SEQ ID NO: 1244 - protein, 10 aa, synthetic construct
LLIYAASSLQ

SEQ ID NO: 1245 - protein, 10 aa, synthetic construct
LVIYAATSRA

SEQ ID NO: 1246 - protein, 10 aa, synthetic construct
LLIYAASSLQ

SEQ ID NO: 1247 - protein, 10 aa, synthetic construct
LLIYAATSRA

SEQ ID NO: 1248 - protein, 10 aa, synthetic construct
LVIYAATSRH

SEQ ID NO: 1249 - protein, 10 aa, synthetic construct
LVIYAATSRA

SEQ ID NO: 1250 - protein, 10 aa, synthetic construct
LVIYATTSRA

SEQ ID NO: 1251 - protein, 10 aa, synthetic construct
LVIYAATSRA

SEQ ID NO: 1252 - protein, 10 aa, synthetic construct
LVIYAATSRA

SEQ ID NO: 1253 - protein, 10 aa, synthetic construct
LLIYATTSRA

SEQ ID NO: 1254 - protein, 10 aa, synthetic construct
LLIYAATSRA

SEQ ID NO: 1255 - protein, 10 aa, synthetic construct
LVIYAATSRH

SEQ ID NO: 1256 - protein, 10 aa, synthetic construct
LLIYAATSRH

SEQ ID NO: 1257 - protein, 10 aa, synthetic construct
LLIYAATSRA

SEQ ID NO: 1258 - protein, 10 aa, synthetic construct
LLIYAATSLA

SEQ ID NO: 1259 - protein, 10 aa, synthetic construct
LLIYAATSRA

SEQ ID NO: 1260 - protein, 10 aa, synthetic construct
LLIYAASSLQ

SEQ ID NO: 1261 - protein, 10 aa, synthetic construct
LLIYAATSRA

SEQ ID NO: 1262 - protein, 10 aa, synthetic construct
LLIYAATSRH

SEQ ID NO: 1263 - protein, 10 aa, synthetic construct
LLIYAATSRA

SEQ ID NO: 1264 - protein, 10 aa, synthetic construct
LVIYAATSLA

SEQ ID NO: 1265 - protein, 10 aa, synthetic construct
LVIYAATSRA

SEQ ID NO: 1266 - protein, 10 aa, synthetic construct
LLIYAASSLQ

SEQ ID NO: 1267 - protein, 10 aa, synthetic construct
LLIYAASSLQ

SEQ ID NO: 1268 - protein, 10 aa, synthetic construct
LLIYAATSRH

SEQ ID NO: 1269 - protein, 10 aa, synthetic construct
LLIYATTSRA

SEQ ID NO: 1270 - protein, 10 aa, synthetic construct
LLIYAATSRA

SEQ ID NO: 1271 - protein, 10 aa, synthetic construct
LVIYAATSRA

SEQ ID NO: 1272 - protein, 10 aa, synthetic construct
LLIYAVTSLH

SEQ ID NO: 1273 - protein, 10 aa, synthetic construct
LVIYAVTSRA

SEQ ID NO: 1274 - protein, 10 aa, synthetic construct
LLIYAATSRA

SEQ ID NO: 1275 - protein, 10 aa, synthetic construct
LLIYAVTSRH

SEQ ID NO: 1276 - protein, 10 aa, synthetic construct
LLIYAASSLQ

SEQ ID NO: 1277 - protein, 10 aa, synthetic construct
LVIYAATSRA

SEQ ID NO: 1278 - protein, 10 aa, synthetic construct
LLIYAATSRA

SEQ ID NO: 1279 - protein, 10 aa, synthetic construct
LLIYAATSRA

SEQ ID NO: 1280 - protein, 10 aa, synthetic construct
LLIYAATSLA

SEQ ID NO: 1281 - protein, 10 aa, synthetic construct
LLIYAVTSRA

SEQ ID NO: 1282 - protein, 10 aa, synthetic construct
LLIYAATSLA

SEQ ID NO: 1283 - protein, 10 aa, synthetic construct
LVIYAATSRA

SEQ ID NO: 1284 - protein, 10 aa, synthetic construct
LVIYAATSRH

SEQ ID NO: 1285 - protein, 10 aa, synthetic construct
LLIYAATSRA

SEQ ID NO: 1286 - protein, 10 aa, synthetic construct
LLIYAATSLA

SEQ ID NO: 1287 - protein, 10 aa, synthetic construct
LLIYAATSLH

SEQ ID NO: 1288 - protein, 10 aa, synthetic construct
LLIYAATSRA

SEQ ID NO: 1289 - protein, 10 aa, synthetic construct
LLIYAATSLA

SEQ ID NO: 1290 - protein, 10 aa, synthetic construct
LLIYATTSRH

SEQ ID NO: 1291 - protein, 10 aa, synthetic construct
LLIYAATSRA

SEQ ID NO: 1292 - protein, 10 aa, synthetic construct
LLIYAATSRA

SEQ ID NO: 1293 - protein, 10 aa, synthetic construct
LVIYAATSRH

SEQ ID NO: 1294 - protein, 10 aa, synthetic construct
LLIYAATSRA

SEQ ID NO: 1295 - protein, 10 aa, synthetic construct
LLIYAASSLQ

SEQ ID NO: 1296 - protein, 10 aa, synthetic construct
LVIYAATSLA

SEQ ID NO: 1297 - protein, 10 aa, synthetic construct
LLIYAATSRA

SEQ ID NO: 1298 - protein, 10 aa, synthetic construct
LLIYAATSLA

SEQ ID NO: 1299 - protein, 10 aa, synthetic construct
LLIYAATSRA

SEQ ID NO: 1300 - protein, 10 aa, synthetic construct
LVIYAATSRA

SEQ ID NO: 1301 - protein, 10 aa, synthetic construct
LVIYAATSLA

SEQ ID NO: 1302 - protein, 10 aa, synthetic construct
LLIYAATSLA

SEQ ID NO: 1303 - protein, 10 aa, synthetic construct
LVIYAATSRH

SEQ ID NO: 1304 - protein, 10 aa, synthetic construct
LLIYAATSLA

SEQ ID NO: 1305 - protein, 10 aa, synthetic construct
LLIYAATSRA

SEQ ID NO: 1306 - protein, 10 aa, synthetic construct
LVIYAATSRA

SEQ ID NO: 1307 - protein, 10 aa, synthetic construct
LLIYAATSRH

SEQ ID NO: 1308 - protein, 10 aa, synthetic construct
LLIYAATSRA

SEQ ID NO: 1309 - protein, 10 aa, synthetic construct
LLIYAASSLQ

SEQ ID NO: 1310 - protein, 10 aa, synthetic construct
LLIYAATSRH

SEQ ID NO: 1311 - protein, 10 aa, synthetic construct
LVIYAATSRA

SEQ ID NO: 1312 - protein, 10 aa, synthetic construct
LLIYAATSLA

SEQ ID NO: 1313 - protein, 10 aa, synthetic construct
LLIYAATSRA

SEQ ID NO: 1314 - protein, 10 aa, synthetic construct
LLIYAATSRA

SEQ ID NO: 1315 - protein, 10 aa, synthetic construct
LLIYAATSRA

SEQ ID NO: 1316 - protein, 8 aa, synthetic construct
QQSDNTPL

SEQ ID NO: 1317 - protein, 8 aa, synthetic construct
QQSYDLPL

SEQ ID NO: 1318 - protein, 8 aa, synthetic construct
QQSYENPL

SEQ ID NO: 1319 - protein, 8 aa, synthetic construct
QQSYDTPL

SEQ ID NO: 1320 - protein, 8 aa, synthetic construct
QQSYDNPL

SEQ ID NO: 1321 - protein, 8 aa, synthetic construct
QQSYSTPL

SEQ ID NO: 1322 - protein, 8 aa, synthetic construct
QQSYESPL

SEQ ID NO: 1323 - protein, 8 aa, synthetic construct
QQSYNTPL

SEQ ID NO: 1324 - protein, 8 aa, synthetic construct
QQSYETPL

SEQ ID NO: 1325 - protein, 8 aa, synthetic construct
QQSYSTPL

SEQ ID NO: 1326 - protein, 8 aa, synthetic construct
QQSYENPL

SEQ ID NO: 1327 - protein, 8 aa, synthetic construct
QQSYSTPL

SEQ ID NO: 1328 - protein, 8 aa, synthetic construct
QQSYDLPL

SEQ ID NO: 1329 - protein, 8 aa, synthetic construct
QQSYDTPL

SEQ ID NO: 1330 - protein, 8 aa, synthetic construct
QQSYNSPL

SEQ ID NO: 1331 - protein, 8 aa, synthetic construct
QQSDSNPL

SEQ ID NO: 1332 - protein, 8 aa, synthetic construct
QQSYDSPL

SEQ ID NO: 1333 - protein, 8 aa, synthetic construct
QQSYDNPL

SEQ ID NO: 1334 - protein, 8 aa, synthetic construct
QQSYENPL

SEQ ID NO: 1335 - protein, 8 aa, synthetic construct
QQSYNSPL

SEQ ID NO: 1336 - protein, 8 aa, synthetic construct
QQSDSNPL

SEQ ID NO: 1337 - protein, 8 aa, synthetic construct
QQSYSTPL

SEQ ID NO: 1338 - protein, 8 aa, synthetic construct
QQSYELPL

SEQ ID NO: 1339 - protein, 8 aa, synthetic construct
QQSYSTPL

SEQ ID NO: 1340 - protein, 8 aa, synthetic construct
QQSYDNPL

SEQ ID NO: 1341 - protein, 8 aa, synthetic construct
QQSYDTPL

SEQ ID NO: 1342 - protein, 8 aa, synthetic construct
QQSYNNPL

SEQ ID NO: 1343 - protein, 8 aa, synthetic construct
QQSYENPL

SEQ ID NO: 1344 - protein, 8 aa, synthetic construct
QQSYDTPL

SEQ ID NO: 1345 - protein, 8 aa, synthetic construct
QQSYDTPL

SEQ ID NO: 1346 - protein, 8 aa, synthetic construct
QQSYDNPL

SEQ ID NO: 1347 - protein, 8 aa, synthetic construct
QQSDDTPL

SEQ ID NO: 1348 - protein, 8 aa, synthetic construct
QQSYESPL

SEQ ID NO: 1349 - protein, 8 aa, synthetic construct
QQSYDTPL

SEQ ID NO: 1350 - protein, 8 aa, synthetic construct
QQSYDTPL

SEQ ID NO: 1351 - protein, 8 aa, synthetic construct
QQSYETPL

SEQ ID NO: 1352 - protein, 8 aa, synthetic construct
QQSYDSPL

SEQ ID NO: 1353 - protein, 8 aa, synthetic construct
QQGYDSPL

SEQ ID NO: 1354 - protein, 8 aa, synthetic construct
QQSYDSPL

SEQ ID NO: 1355 - protein, 8 aa, synthetic construct
QQSYDSPL

SEQ ID NO: 1356 - protein, 8 aa, synthetic construct
QQSYDSPL

SEQ ID NO: 1357 - protein, 8 aa, synthetic construct
QQSYESPL

SEQ ID NO: 1358 - protein, 8 aa, synthetic construct
QQSYDSPL

SEQ ID NO: 1359 - protein, 8 aa, synthetic construct
QQSYDSPL

SEQ ID NO: 1360 - protein, 8 aa, synthetic construct
QQSYSTPL

SEQ ID NO: 1361 - protein, 8 aa, synthetic construct
QQSYESPL

SEQ ID NO: 1362 - protein, 8 aa, synthetic construct
QQSYSSPL

SEQ ID NO: 1363 - protein, 8 aa, synthetic construct
QQSYDLPL

SEQ ID NO: 1364 - protein, 8 aa, synthetic construct
QQSYDTPL

SEQ ID NO: 1365 - protein, 8 aa, synthetic construct
QQSYETPL

SEQ ID NO: 1366 - protein, 8 aa, synthetic construct
QQSYNSPL

SEQ ID NO: 1367 - protein, 8 aa, synthetic construct
QQSYDSPL

SEQ ID NO: 1368 - protein, 8 aa, synthetic construct
QQSYDSPL

SEQ ID NO: 1369 - protein, 8 aa, synthetic construct
QQSYDSPL

SEQ ID NO: 1370 - protein, 8 aa, synthetic construct
QQSYESPL

SEQ ID NO: 1371 - protein, 8 aa, synthetic construct
QQSYDLPL

SEQ ID NO: 1372 - protein, 8 aa, synthetic construct
QQSYETPL

SEQ ID NO: 1373 - protein, 8 aa, synthetic construct
QQSYDLPL

SEQ ID NO: 1374 - protein, 8 aa, synthetic construct
QQSYDLPL

SEQ ID NO: 1375 - protein, 8 aa, synthetic construct
QQSYDTPL

SEQ ID NO: 1376 - protein, 8 aa, synthetic construct
QQSYSSPL

SEQ ID NO: 1377 - protein, 8 aa, synthetic construct
QQSYDLPL

SEQ ID NO: 1378 - protein, 8 aa, synthetic construct
QQSYNSPL

SEQ ID NO: 1379 - protein, 8 aa, synthetic construct
QQSYDTPL

SEQ ID NO: 1380 - protein, 8 aa, synthetic construct
QQSYDNPL

SEQ ID NO: 1381 - protein, 8 aa, synthetic construct
QQSYDNPL

SEQ ID NO: 1382 - protein, 8 aa, synthetic construct
QQSYDLPL

SEQ ID NO: 1383 - protein, 8 aa, synthetic construct
QQSYESPL

SEQ ID NO: 1384 - protein, 8 aa, synthetic construct
QQSYETPL

SEQ ID NO: 1385 - protein, 8 aa, synthetic construct
QQSYNLPL

SEQ ID NO: 1386 - protein, 8 aa, synthetic construct
QQSYDLPL

SEQ ID NO: 1387 - protein, 8 aa, synthetic construct
QQSYENPL

SEQ ID NO: 1388 - protein, 8 aa, synthetic construct
QQSYSTPL

SEQ ID NO: 1389 - protein, 8 aa, synthetic construct
QQSYETPL

SEQ ID NO: 1390 - protein, 8 aa, synthetic construct
QQSYDTPL

SEQ ID NO: 1391 - protein, 8 aa, synthetic construct
QQSYETPL

SEQ ID NO: 1392 - protein, 8 aa, synthetic construct
QQSYSSPL

SEQ ID NO: 1393 - protein, 8 aa, synthetic construct
QQSYDTPL

SEQ ID NO: 1394 - protein, 8 aa, synthetic construct
QQSYELPL

SEQ ID NO: 1395 - protein, 8 aa, synthetic construct
QQSYNTPL

SEQ ID NO: 1396 - protein, 8 aa, synthetic construct
QQSYDTPL

SEQ ID NO: 1397 - protein, 8 aa, synthetic construct
QQSYDTPL

SEQ ID NO: 1398 - protein, 8 aa, synthetic construct
QQSYDLPL

SEQ ID NO: 1399 - protein, 8 aa, synthetic construct
QQSYDNPL

SEQ ID NO: 1400 - protein, 8 aa, synthetic construct
QQSYDNPL

SEQ ID NO: 1401 - protein, 8 aa, synthetic construct
QQSYDSPL

SEQ ID NO: 1402 - protein, 8 aa, synthetic construct
QQSYSTPL

SEQ ID NO: 1403 - protein, 8 aa, synthetic construct
QQSYDTPL

SEQ ID NO: 1404 - protein, 8 aa, synthetic construct
QQSYDTPL

SEQ ID NO: 1405 - protein, 8 aa, synthetic construct
QQSYDSPL

SEQ ID NO: 1406 - protein, 8 aa, synthetic construct
QQSYDLPL

SEQ ID NO: 1407 - protein, 8 aa, synthetic construct
QQSYNTPL

SEQ ID NO: 1408 - protein, 8 aa, synthetic construct
QQSYDSPL

SEQ ID NO: 1409 - protein, 6 aa, synthetic construct
SSYSMN

SEQ ID NO: 1410 - protein, 6 aa, synthetic construct
DDYGMN

SEQ ID NO: 1411 - protein, 6 aa, synthetic construct
SSYGMH

SEQ ID NO: 1412 - protein, 6 aa, synthetic construct
DSYGMH

SEQ ID NO: 1413 - protein, 6 aa, synthetic construct
DSYGMH

SEQ ID NO: 1414 - protein, 6 aa, synthetic construct
SSYGMH

SEQ ID NO: 1415 - protein, 6 aa, synthetic construct
SSYGMH

SEQ ID NO: 1416 - protein, 6 aa, synthetic construct
DSYGMN

SEQ ID NO: 1417 - protein, 6 aa, synthetic construct
SSYGMH

SEQ ID NO: 1418 - protein, 6 aa, synthetic construct
SSYSMN

SEQ ID NO: 1419 - protein, 6 aa, synthetic construct
SSYGMN

SEQ ID NO: 1420 - protein, 6 aa, synthetic construct
SSYGMH

SEQ ID NO: 1421 - protein, 6 aa, synthetic construct
DSYGMN

SEQ ID NO: 1422 - protein, 6 aa, synthetic construct
DSYGMN

SEQ ID NO: 1423 - protein, 6 aa, synthetic construct
SDYSMN

SEQ ID NO: 1424 - protein, 6 aa, synthetic construct
SSYGMH

SEQ ID NO: 1425 - protein, 6 aa, synthetic construct
DSYGMH

SEQ ID NO: 1426 - protein, 6 aa, synthetic construct
SSYGMH

SEQ ID NO: 1427 - protein, 6 aa, synthetic construct
DSYSMN

SEQ ID NO: 1428 - protein, 6 aa, synthetic construct
SSYGMN

SEQ ID NO: 1429 - protein, 6 aa, synthetic construct
SDYSMN

SEQ ID NO: 1430 - protein, 6 aa, synthetic construct
DSYGMN

SEQ ID NO: 1431 - protein, 6 aa, synthetic construct
SSYGMN

SEQ ID NO: 1432 - protein, 6 aa, synthetic construct
SDYGMN

SEQ ID NO: 1433 - protein, 6 aa, synthetic construct
DDYGMN

SEQ ID NO: 1434 - protein, 6 aa, synthetic construct
SSYGMN

SEQ ID NO: 1435 - protein, 6 aa, synthetic construct
DSYGMN

SEQ ID NO: 1436 - protein, 6 aa, synthetic construct
SSYSMN

SEQ ID NO: 1437 - protein, 6 aa, synthetic construct
SSYSMN

SEQ ID NO: 1438 - protein, 6 aa, synthetic construct
SSYGMH

SEQ ID NO: 1439 - protein, 6 aa, synthetic construct
DSYGMN

SEQ ID NO: 1440 - protein, 6 aa, synthetic construct
SSYGMN

SEQ ID NO: 1441 - protein, 6 aa, synthetic construct
SSYSMN

SEQ ID NO: 1442 - protein, 6 aa, synthetic construct
SSYSMN

SEQ ID NO: 1443 - protein, 6 aa, synthetic construct
DSYGMN

SEQ ID NO: 1444 - protein, 6 aa, synthetic construct
SDYGMN

SEQ ID NO: 1445 - protein, 6 aa, synthetic construct
SSYSMN

SEQ ID NO: 1446 - protein, 6 aa, synthetic construct
SDYSMN

SEQ ID NO: 1447 - protein, 6 aa, synthetic construct
SSYSMN

SEQ ID NO: 1448 - protein, 6 aa, synthetic construct
DSYGMN

SEQ ID NO: 1449 - protein, 6 aa, synthetic construct
SSYGMN

SEQ ID NO: 1450 - protein, 6 aa, synthetic construct
SSYGMH

SEQ ID NO: 1451 - protein, 6 aa, synthetic construct
SDYGMN

SEQ ID NO: 1452 - protein, 6 aa, synthetic construct
DSYGMN

SEQ ID NO: 1453 - protein, 6 aa, synthetic construct
SSYSMN

SEQ ID NO: 1454 - protein, 6 aa, synthetic construct
SDYGMN

SEQ ID NO: 1455 - protein, 6 aa, synthetic construct
DSYGMN

SEQ ID NO: 1456 - protein, 6 aa, synthetic construct
SSYGMN

SEQ ID NO: 1457 - protein, 6 aa, synthetic construct
SDYSMN

SEQ ID NO: 1458 - protein, 6 aa, synthetic construct
SDYGMN

SEQ ID NO: 1459 - protein, 6 aa, synthetic construct
DDYSMN

SEQ ID NO: 1460 - protein, 6 aa, synthetic construct
DDYGMN

SEQ ID NO: 1461 - protein, 6 aa, synthetic construct
DSYSMN

SEQ ID NO: 1462 - protein, 6 aa, synthetic construct
DSYGMN

SEQ ID NO: 1463 - protein, 6 aa, synthetic construct
SSYGMN

SEQ ID NO: 1464 - protein, 6 aa, synthetic construct
SDYSMN

SEQ ID NO: 1465 - protein, 6 aa, synthetic construct
DSYSMN

SEQ ID NO: 1466 - protein, 6 aa, synthetic construct
SDYGMN

SEQ ID NO: 1467 - protein, 6 aa, synthetic construct
DSYGMN

SEQ ID NO: 1468 - protein, 6 aa, synthetic construct
SSYSMN

SEQ ID NO: 1469 - protein, 6 aa, synthetic construct
DSYGMH

SEQ ID NO: 1470 - protein, 6 aa, synthetic construct
SSYSMN

SEQ ID NO: 1471 - protein, 6 aa, synthetic construct
SDYGMN

SEQ ID NO: 1472 - protein, 6 aa, synthetic construct
SSYGMN

SEQ ID NO: 1473 - protein, 6 aa, synthetic construct
DDYGMN

SEQ ID NO: 1474 - protein, 6 aa, synthetic construct
SSYGMN

SEQ ID NO: 1475 - protein, 6 aa, synthetic construct
SSYGMN

SEQ ID NO: 1476 - protein, 6 aa, synthetic construct
SSYGMN

SEQ ID NO: 1477 - protein, 6 aa, synthetic construct
SSYSMN

SEQ ID NO: 1478 - protein, 6 aa, synthetic construct
SSYSMN

SEQ ID NO: 1479 - protein, 6 aa, synthetic construct
DSYSMN

SEQ ID NO: 1480 - protein, 6 aa, synthetic construct
SSYGMN

SEQ ID NO: 1481 - protein, 6 aa, synthetic construct
DSYGMH

SEQ ID NO: 1482 - protein, 6 aa, synthetic construct
SDYSMN

SEQ ID NO: 1483 - protein, 6 aa, synthetic construct
DSYGMN

SEQ ID NO: 1484 - protein, 6 aa, synthetic construct
SSYGMH

SEQ ID NO: 1485 - protein, 6 aa, synthetic construct
SSYGMN

SEQ ID NO: 1486 - protein, 6 aa, synthetic construct
SSYSMN

SEQ ID NO: 1487 - protein, 6 aa, synthetic construct
DDYGMN

SEQ ID NO: 1488 - protein, 6 aa, synthetic construct
SSYSMN

SEQ ID NO: 1489 - protein, 6 aa, synthetic construct
DSYSMN

SEQ ID NO: 1490 - protein, 6 aa, synthetic construct
SSYSMN

SEQ ID NO: 1491 - protein, 6 aa, synthetic construct
SDYGMH

SEQ ID NO: 1492 - protein, 6 aa, synthetic construct
SSYGMN

SEQ ID NO: 1493 - protein, 6 aa, synthetic construct
DSYSMN

SEQ ID NO: 1494 - protein, 6 aa, synthetic construct
SDYGMN

SEQ ID NO: 1495 - protein, 6 aa, synthetic construct
SDYGMH

SEQ ID NO: 1496 - protein, 6 aa, synthetic construct
SSYGMN

SEQ ID NO: 1497 - protein, 6 aa, synthetic construct
SSYSMN

SEQ ID NO: 1498 - protein, 6 aa, synthetic construct
SSYSMN

SEQ ID NO: 1499 - protein, 6 aa, synthetic construct
SSYGMN

SEQ ID NO: 1500 - protein, 6 aa, synthetic construct
SSYSMN

SEQ ID NO: 1501 - protein, 6 aa, synthetic construct
DSYSMN

SEQ ID NO: 1502 - protein, 6 aa, synthetic construct
SSYGMN

SEQ ID NO: 1503 - protein, 6 aa, synthetic construct
SSYSMN

SEQ ID NO: 1504 - protein, 6 aa, synthetic construct
SDYGMN

SEQ ID NO: 1505 - protein, 6 aa, synthetic construct
SDYSMN

SEQ ID NO: 1506 - protein, 6 aa, synthetic construct
DSYGMN

SEQ ID NO: 1507 - protein, 6 aa, synthetic construct
DSYSMN

SEQ ID NO: 1508 - protein, 6 aa, synthetic construct
DSYGMN

SEQ ID NO: 1509 - protein, 6 aa, synthetic construct
SSYGMN

SEQ ID NO: 1510 - protein, 6 aa, synthetic construct
SSYGMH

SEQ ID NO: 1511 - protein, 6 aa, synthetic construct
SSYGMN

SEQ ID NO: 1512 - protein, 6 aa, synthetic construct
SSYGMN

SEQ ID NO: 1513 - protein, 6 aa, synthetic construct
SDYGMN

SEQ ID NO: 1514 - protein, 6 aa, synthetic construct
DDYSMN

SEQ ID NO: 1515 - protein, 6 aa, synthetic construct
DSYGMN

SEQ ID NO: 1516 - protein, 6 aa, synthetic construct
DSYGMN

SEQ ID NO: 1517 - protein, 6 aa, synthetic construct
SSYSMN

SEQ ID NO: 1518 - protein, 6 aa, synthetic construct
DSYSMN

SEQ ID NO: 1519 - protein, 6 aa, synthetic construct
DSYGMN

SEQ ID NO: 1520 - protein, 6 aa, synthetic construct
SSYSMN

SEQ ID NO: 1521 - protein, 6 aa, synthetic construct
SSYSMN

SEQ ID NO: 1522 - protein, 6 aa, synthetic construct
SSYGMN

SEQ ID NO: 1523 - protein, 6 aa, synthetic construct
SSYGMN

SEQ ID NO: 1524 - protein, 6 aa, synthetic construct
DDYSMN

SEQ ID NO: 1525 - protein, 6 aa, synthetic construct
SSYSMN

SEQ ID NO: 1526 - protein, 6 aa, synthetic construct
SSYSMN

SEQ ID NO: 1527 - protein, 6 aa, synthetic construct
DSYSMN

SEQ ID NO: 1528 - protein, 6 aa, synthetic construct
SSYGMN

SEQ ID NO: 1529 - protein, 6 aa, synthetic construct
DSYSMN

SEQ ID NO: 1530 - protein, 6 aa, synthetic construct
SSYGMN

SEQ ID NO: 1531 - protein, 6 aa, synthetic construct
SSYSMN

SEQ ID NO: 1532 - protein, 6 aa, synthetic construct
SSYGMN

SEQ ID NO: 1533 - protein, 6 aa, synthetic construct
DSYGMN

SEQ ID NO: 1534 - protein, 6 aa, synthetic construct
DSYSMN

SEQ ID NO: 1535 - protein, 6 aa, synthetic construct
DSYSMN

SEQ ID NO: 1536 - protein, 6 aa, synthetic construct
SSYGMN

SEQ ID NO: 1537 - protein, 6 aa, synthetic construct
SSYGMN

SEQ ID NO: 1538 - protein, 6 aa, synthetic construct
DDSSMH

SEQ ID NO: 1539 - protein, 6 aa, synthetic construct
SSYGMN

SEQ ID NO: 1540 - protein, 6 aa, synthetic construct
DSYSMN

SEQ ID NO: 1541 - protein, 6 aa, synthetic construct
SSYSMN

SEQ ID NO: 1542 - protein, 6 aa, synthetic construct
SDYSMN

SEQ ID NO: 1543 - protein, 6 aa, synthetic construct
SSYSMN

SEQ ID NO: 1544 - protein, 6 aa, synthetic construct
SDYGMH

SEQ ID NO: 1545 - protein, 6 aa, synthetic construct
SSYGMN

SEQ ID NO: 1546 - protein, 6 aa, synthetic construct
SDYGMN

SEQ ID NO: 1547 - protein, 6 aa, synthetic construct
SSYSMN

SEQ ID NO: 1548 - protein, 6 aa, synthetic construct
SSYSMN

SEQ ID NO: 1549 - protein, 6 aa, synthetic construct
SSYGMN

SEQ ID NO: 1550 - protein, 6 aa, synthetic construct
SDYGMN

SEQ ID NO: 1551 - protein, 6 aa, synthetic construct
SSYGMN

SEQ ID NO: 1552 - protein, 6 aa, synthetic construct
SDYSMN

SEQ ID NO: 1553 - protein, 6 aa, synthetic construct
SSYGMH

SEQ ID NO: 1554 - protein, 6 aa, synthetic construct
DSYSMN

SEQ ID NO: 1555 - protein, 6 aa, synthetic construct
DSYSMN

SEQ ID NO: 1556 - protein, 6 aa, synthetic construct
DSYSMN

SEQ ID NO: 1557 - protein, 6 aa, synthetic construct
SSYSMN

SEQ ID NO: 1558 - protein, 6 aa, synthetic construct
DDYSMN

SEQ ID NO: 1559 - protein, 6 aa, synthetic construct
SSYSMN

SEQ ID NO: 1560 - protein, 6 aa, synthetic construct
SSYSMN

SEQ ID NO: 1561 - protein, 6 aa, synthetic construct
DSYSMN

SEQ ID NO: 1562 - protein, 6 aa, synthetic construct
DSYSMN

SEQ ID NO: 1563 - protein, 6 aa, synthetic construct
DDYSMN

SEQ ID NO: 1564 - protein, 6 aa, synthetic construct
DSYSMN

SEQ ID NO: 1565 - protein, 6 aa, synthetic construct
SSYSMN

SEQ ID NO: 1566 - protein, 6 aa, synthetic construct
DSYSMN

SEQ ID NO: 1567 - protein, 6 aa, synthetic construct
DSYSMN

SEQ ID NO: 1568 - protein, 6 aa, synthetic construct
DSYGMN

SEQ ID NO: 1569 - protein, 6 aa, synthetic construct
SDYSMN

SEQ ID NO: 1570 - protein, 6 aa, synthetic construct
SSYGMH

SEQ ID NO: 1571 - protein, 6 aa, synthetic construct
SSYGMN

SEQ ID NO: 1572 - protein, 6 aa, synthetic construct
SDYGMN

SEQ ID NO: 1573 - protein, 6 aa, synthetic construct
SDYSMN

SEQ ID NO: 1574 - protein, 6 aa, synthetic construct
DSYSMN

SEQ ID NO: 1575 - protein, 6 aa, synthetic construct
DSYGMN

SEQ ID NO: 1576 - protein, 6 aa, synthetic construct
DSYGMN

SEQ ID NO: 1577 - protein, 6 aa, synthetic construct
SSYGMN

SEQ ID NO: 1578 - protein, 6 aa, synthetic construct
SSYGMN

SEQ ID NO: 1579 - protein, 6 aa, synthetic construct
SDYSMN

SEQ ID NO: 1580 - protein, 6 aa, synthetic construct
DSYGMN

SEQ ID NO: 1581 - protein, 6 aa, synthetic construct
DSYGMN

SEQ ID NO: 1582 - protein, 6 aa, synthetic construct
DDYSMN

SEQ ID NO: 1583 - protein, 6 aa, synthetic construct
SSYSMN

SEQ ID NO: 1584 - protein, 6 aa, synthetic construct
SSYSMN

SEQ ID NO: 1585 - protein, 6 aa, synthetic construct
SSYSMN

SEQ ID NO: 1586 - protein, 6 aa, synthetic construct
SSYSMN

SEQ ID NO: 1587 - protein, 6 aa, synthetic construct
DSYSMN

SEQ ID NO: 1588 - protein, 6 aa, synthetic construct
DSYSMN

SEQ ID NO: 1589 - protein, 6 aa, synthetic construct
SSYSMN

SEQ ID NO: 1590 - protein, 6 aa, synthetic construct
SSYSMN

SEQ ID NO: 1591 - protein, 6 aa, synthetic construct
DSYSMN

SEQ ID NO: 1592 - protein, 6 aa, synthetic construct
SSYGMN

SEQ ID NO: 1593 - protein, 6 aa, synthetic construct
DSYGMN

SEQ ID NO: 1594 - protein, 6 aa, synthetic construct
SSYGMN

SEQ ID NO: 1595 - protein, 6 aa, synthetic construct
SSYSMN

SEQ ID NO: 1596 - protein, 6 aa, synthetic construct
SDYGMN

SEQ ID NO: 1597 - protein, 6 aa, synthetic construct
SSYSMN

SEQ ID NO: 1598 - protein, 6 aa, synthetic construct
DSYSMN

SEQ ID NO: 1599 - protein, 6 aa, synthetic construct
SDYSMN

SEQ ID NO: 1600 - protein, 6 aa, synthetic construct
SSYSMN

SEQ ID NO: 1601 - protein, 6 aa, synthetic construct
SSYSMN

SEQ ID NO: 1602 - protein, 6 aa, synthetic construct
DSYSMN

SEQ ID NO: 1603 - protein, 6 aa, synthetic construct
DSYSMN

SEQ ID NO: 1604 - protein, 6 aa, synthetic construct
DSYSMN

SEQ ID NO: 1605 - protein, 6 aa, synthetic construct
DDYSMN

SEQ ID NO: 1606 - protein, 6 aa, synthetic construct
DSYSMN

SEQ ID NO: 1607 - protein, 6 aa, synthetic construct
DSYGMN

SEQ ID NO: 1608 - protein, 6 aa, synthetic construct
SSYGMN

SEQ ID NO: 1609 - protein, 6 aa, synthetic construct
SSYSMN

SEQ ID NO: 1610 - protein, 6 aa, synthetic construct
SSYSMN

SEQ ID NO: 1611 - protein, 6 aa, synthetic construct
SDYSMN

SEQ ID NO: 1612 - protein, 6 aa, synthetic construct
SSYGMN

SEQ ID NO: 1613 - protein, 6 aa, synthetic construct
SSYGMN

SEQ ID NO: 1614 - protein, 6 aa, synthetic construct
DSYSMN

SEQ ID NO: 1615 - protein, 6 aa, synthetic construct
DSYSMN

SEQ ID NO: 1616 - protein, 6 aa, synthetic construct
SSYGMN

SEQ ID NO: 1617 - protein, 6 aa, synthetic construct
SSYSMN

SEQ ID NO: 1618 - protein, 6 aa, synthetic construct
DSYSMN

SEQ ID NO: 1619 - protein, 6 aa, synthetic construct
SSYSMN

SEQ ID NO: 1620 - protein, 6 aa, synthetic construct
SSYGMH

SEQ ID NO: 1621 - protein, 6 aa, synthetic construct
SSYSMN

SEQ ID NO: 1622 - protein, 6 aa, synthetic construct
SSYGMN

SEQ ID NO: 1623 - protein, 6 aa, synthetic construct
DSYSMN

SEQ ID NO: 1624 - protein, 6 aa, synthetic construct
SSYGMN

SEQ ID NO: 1625 - protein, 6 aa, synthetic construct
DSYGMN

SEQ ID NO: 1626 - protein, 6 aa, synthetic construct
SSYSMN

SEQ ID NO: 1627 - protein, 6 aa, synthetic construct
SSYGMN

SEQ ID NO: 1628 - protein, 6 aa, synthetic construct
DDYGMH

SEQ ID NO: 1629 - protein, 6 aa, synthetic construct
DDSSMH

SEQ ID NO: 1630 - protein, 6 aa, synthetic construct
SSYSMN

SEQ ID NO: 1631 - protein, 6 aa, synthetic construct
SSYGMN

SEQ ID NO: 1632 - protein, 6 aa, synthetic construct
SDYGMN

SEQ ID NO: 1633 - protein, 6 aa, synthetic construct
DSYGMN

SEQ ID NO: 1634 - protein, 6 aa, synthetic construct
SSYSMN

SEQ ID NO: 1635 - protein, 6 aa, synthetic construct
SDYSMN

SEQ ID NO: 1636 - protein, 6 aa, synthetic construct
SSYGMN

SEQ ID NO: 1637 - protein, 6 aa, synthetic construct
DSYSMN

SEQ ID NO: 1638 - protein, 6 aa, synthetic construct
SDYGMN

SEQ ID NO: 1639 - protein, 6 aa, synthetic construct
SSYSMN

SEQ ID NO: 1640 - protein, 6 aa, synthetic construct
DSYGMH

SEQ ID NO: 1641 - protein, 6 aa, synthetic construct
SSYSMN

SEQ ID NO: 1642 - protein, 6 aa, synthetic construct
DSYSMN

SEQ ID NO: 1643 - protein, 6 aa, synthetic construct
SSYSMN

SEQ ID NO: 1644 - protein, 6 aa, synthetic construct
DSYSMN

SEQ ID NO: 1645 - protein, 6 aa, synthetic construct
DSYGMN

SEQ ID NO: 1646 - protein, 6 aa, synthetic construct
SSYSMN

SEQ ID NO: 1647 - protein, 6 aa, synthetic construct
SSYSMN

SEQ ID NO: 1648 - protein, 6 aa, synthetic construct
SSYGMN

SEQ ID NO: 1649 - protein, 6 aa, synthetic construct
SSYGMN

SEQ ID NO: 1650 - protein, 6 aa, synthetic construct
SDYGMN

SEQ ID NO: 1651 - protein, 6 aa, synthetic construct
DSYGMN

SEQ ID NO: 1652 - protein, 6 aa, synthetic construct
DSYSMN

SEQ ID NO: 1653 - protein, 6 aa, synthetic construct
DSYGMN

SEQ ID NO: 1654 - protein, 6 aa, synthetic construct
DSYSMN

SEQ ID NO: 1655 - protein, 6 aa, synthetic construct
SDYSMN

SEQ ID NO: 1656 - protein, 6 aa, synthetic construct
DSYSMN

SEQ ID NO: 1657 - protein, 13 aa, synthetic construct
WVAGINYNSGYKG

SEQ ID NO: 1658 - protein, 13 aa, synthetic construct
WVSGINYNSGYTS

SEQ ID NO: 1659 - protein, 13 aa, synthetic construct
WVAGINYNGGYTS

SEQ ID NO: 1660 - protein, 13 aa, synthetic construct
WVASINYNSGYTS

SEQ ID NO: 1661 - protein, 13 aa, synthetic construct
WVSNINYNGGYKS

SEQ ID NO: 1662 - protein, 13 aa, synthetic construct
WVASINYNSGYTS

SEQ ID NO: 1663 - protein, 13 aa, synthetic construct
WVAGINYNGGYTS

SEQ ID NO: 1664 - protein, 13 aa, synthetic construct
WVSSINYNSGYKS

SEQ ID NO: 1665 - protein, 13 aa, synthetic construct
WVASINYNGGYTS

SEQ ID NO: 1666 - protein, 13 aa, synthetic construct
WVAGINYNGGYKS

SEQ ID NO: 1667 - protein, 13 aa, synthetic construct
WVAGINYNSGYKS

SEQ ID NO: 1668 - protein, 13 aa, synthetic construct
WVSGINYNSGYTS

SEQ ID NO: 1669 - protein, 13 aa, synthetic construct
WVSNINYNSGYTS

SEQ ID NO: 1670 - protein, 13 aa, synthetic construct
WVSNINYNGGYTG

SEQ ID NO: 1671 - protein, 13 aa, synthetic construct
WVSGINYNSGYKG

SEQ ID NO: 1672 - protein, 13 aa, synthetic construct
WVAGINYNGGYTS

SEQ ID NO: 1673 - protein, 13 aa, synthetic construct
WVSGINYNSGYTS

SEQ ID NO: 1674 - protein, 13 aa, synthetic construct
WVASINYNSGYKS

SEQ ID NO: 1675 - protein, 13 aa, synthetic construct
WVSGINYNSGYKG

SEQ ID NO: 1676 - protein, 13 aa, synthetic construct
WVAGINYNSGYKS

SEQ ID NO: 1677 - protein, 13 aa, synthetic construct
WVSGINYNGGYTS

SEQ ID NO: 1678 - protein, 13 aa, synthetic construct
WVAGINYNSGYKS

SEQ ID NO: 1679 - protein, 13 aa, synthetic construct
WVANINYNGGYTG

SEQ ID NO: 1680 - protein, 13 aa, synthetic construct
WVSSINYNGGYTG

SEQ ID NO: 1681 - protein, 13 aa, synthetic construct
WVAGINYNGGYKS

SEQ ID NO: 1682 - protein, 13 aa, synthetic construct
WVSGINYNSGYTG

SEQ ID NO: 1683 - protein, 13 aa, synthetic construct
WVAGINYNSGYKS

SEQ ID NO: 1684 - protein, 13 aa, synthetic construct
WVSGINYNSGYTG

SEQ ID NO: 1685 - protein, 13 aa, synthetic construct
WVSNINYNGGYKS

SEQ ID NO: 1686 - protein, 13 aa, synthetic construct
WVASINYNGGYTG

SEQ ID NO: 1687 - protein, 13 aa, synthetic construct
WVSNINYNGGYKG

SEQ ID NO: 1688 - protein, 13 aa, synthetic construct
WVSGINYNSGYTS

SEQ ID NO: 1689 - protein, 13 aa, synthetic construct
WVAGINYNSGYKG

SEQ ID NO: 1690 - protein, 13 aa, synthetic construct
WVSGINYNGGYTS

SEQ ID NO: 1691 - protein, 13 aa, synthetic construct
WVSGINYNGGYKG

SEQ ID NO: 1692 - protein, 13 aa, synthetic construct
WVSGINYNGGYTS

SEQ ID NO: 1693 - protein, 13 aa, synthetic construct
WVANINYNSGYKS

SEQ ID NO: 1694 - protein, 13 aa, synthetic construct
WVAGINYNSGYTS

SEQ ID NO: 1695 - protein, 13 aa, synthetic construct
WVSGINYNSGYTS

SEQ ID NO: 1696 - protein, 13 aa, synthetic construct
WVSNINYNGGYTS

SEQ ID NO: 1697 - protein, 13 aa, synthetic construct
WVSSINYNGGYTG

SEQ ID NO: 1698 - protein, 13 aa, synthetic construct
WVSGINYNGGYTS

SEQ ID NO: 1699 - protein, 13 aa, synthetic construct
WVASINYNSGYTS

SEQ ID NO: 1700 - protein, 13 aa, synthetic construct
WVSNINYNSGYKG

SEQ ID NO: 1701 - protein, 13 aa, synthetic construct
WVSNINYNSGYKS

SEQ ID NO: 1702 - protein, 13 aa, synthetic construct
WVSSINYNGGYKG

SEQ ID NO: 1703 - protein, 13 aa, synthetic construct
WVSSINYNGGYTS

SEQ ID NO: 1704 - protein, 13 aa, synthetic construct
WVAGINYNGGYKS

SEQ ID NO: 1705 - protein, 13 aa, synthetic construct
WVAGINYNSGYTG

SEQ ID NO: 1706 - protein, 13 aa, synthetic construct
WVSGINYNGGYKG

SEQ ID NO: 1707 - protein, 13 aa, synthetic construct
WVSGINYNGGYKS

SEQ ID NO: 1708 - protein, 13 aa, synthetic construct
WVSSINYNGGYTG

SEQ ID NO: 1709 - protein, 13 aa, synthetic construct
WVSSINYNSGYTG

SEQ ID NO: 1710 - protein, 13 aa, synthetic construct
WVSNINYNGGYTS

SEQ ID NO: 1711 - protein, 13 aa, synthetic construct
WVAGINYNGGYKS

SEQ ID NO: 1712 - protein, 13 aa, synthetic construct
WVSSINYNGGYKG

SEQ ID NO: 1713 - protein, 13 aa, synthetic construct
WVSSINYNSGYKG

SEQ ID NO: 1714 - protein, 13 aa, synthetic construct
WVASINYNSGYKG

SEQ ID NO: 1715 - protein, 13 aa, synthetic construct
WVSSINYNSGYKG

SEQ ID NO: 1716 - protein, 13 aa, synthetic construct
WVAGINYNSGYKS

SEQ ID NO: 1717 - protein, 13 aa, synthetic construct
WVANINYNGGYTG

SEQ ID NO: 1718 - protein, 13 aa, synthetic construct
WVAGINYNSGYTG

SEQ ID NO: 1719 - protein, 13 aa, synthetic construct
WVANINYNGGYTS

SEQ ID NO: 1720 - protein, 13 aa, synthetic construct
WVSGINYNSGYKS

SEQ ID NO: 1721 - protein, 13 aa, synthetic construct
WVSGINYNGGYTS

SEQ ID NO: 1722 - protein, 13 aa, synthetic construct
WVSNINYNGGYTG

SEQ ID NO: 1723 - protein, 13 aa, synthetic construct
WVAGINYNGGYKG

SEQ ID NO: 1724 - protein, 13 aa, synthetic construct
WVSNINYNGGYTS

SEQ ID NO: 1725 - protein, 13 aa, synthetic construct
WVAGINYNSGYTG

SEQ ID NO: 1726 - protein, 13 aa, synthetic construct
WVAGINYNSGYTS

SEQ ID NO: 1727 - protein, 13 aa, synthetic construct
WVSGINYNGGYTS

SEQ ID NO: 1728 - protein, 13 aa, synthetic construct
WVSGINYNSGYKS

SEQ ID NO: 1729 - protein, 13 aa, synthetic construct
WVSGINYNSGYTS

SEQ ID NO: 1730 - protein, 13 aa, synthetic construct
WVSNINYNGGYKS

SEQ ID NO: 1731 - protein, 13 aa, synthetic construct
WVSGINYNSGYTS

SEQ ID NO: 1732 - protein, 13 aa, synthetic construct
WVANINYNGGYTS

SEQ ID NO: 1733 - protein, 13 aa, synthetic construct
WVSGINYNGGYKS

SEQ ID NO: 1734 - protein, 13 aa, synthetic construct
WVSGINYNGGYTS

SEQ ID NO: 1735 - protein, 13 aa, synthetic construct
WVSNINYNGGYKS

SEQ ID NO: 1736 - protein, 13 aa, synthetic construct
WVASINYNSGYTG

SEQ ID NO: 1737 - protein, 13 aa, synthetic construct
WVAGINYNSGYTS

SEQ ID NO: 1738 - protein, 13 aa, synthetic construct
WVANINYNSGYTG

SEQ ID NO: 1739 - protein, 13 aa, synthetic construct
WVSGINYNGGYTG

SEQ ID NO: 1740 - protein, 13 aa, synthetic construct
WVAGINYNGGYTS

SEQ ID NO: 1741 - protein, 13 aa, synthetic construct
WVAGINYNSGYTG

SEQ ID NO: 1742 - protein, 13 aa, synthetic construct
WVSGINYNGGYTS

SEQ ID NO: 1743 - protein, 13 aa, synthetic construct
WVASINYNSGYTS

SEQ ID NO: 1744 - protein, 13 aa, synthetic construct
WVASINYNSGYTG

SEQ ID NO: 1745 - protein, 13 aa, synthetic construct
WVAGINYNSGYKG

SEQ ID NO: 1746 - protein, 13 aa, synthetic construct
WVAGINYNSGYTG

SEQ ID NO: 1747 - protein, 13 aa, synthetic construct
WVSNINYNGGYTG

SEQ ID NO: 1748 - protein, 13 aa, synthetic construct
WVSGINYNGGYTS

SEQ ID NO: 1749 - protein, 13 aa, synthetic construct
WVSNINYNGGYKS

SEQ ID NO: 1750 - protein, 13 aa, synthetic construct
WVSNINYNGGYKS

SEQ ID NO: 1751 - protein, 13 aa, synthetic construct
WVSNINYNGGYTG

SEQ ID NO: 1752 - protein, 13 aa, synthetic construct
WVASINYNGGYTG

SEQ ID NO: 1753 - protein, 13 aa, synthetic construct
WVSNINYNSGYTG

SEQ ID NO: 1754 - protein, 13 aa, synthetic construct
WVSGINYNGGYTS

SEQ ID NO: 1755 - protein, 13 aa, synthetic construct
WVAGINYNSGYTS

SEQ ID NO: 1756 - protein, 13 aa, synthetic construct
WVSNINYNGGYTG

SEQ ID NO: 1757 - protein, 13 aa, synthetic construct
WVSNINYNGGYTS

SEQ ID NO: 1758 - protein, 13 aa, synthetic construct
WVASINYNSGYTS

SEQ ID NO: 1759 - protein, 13 aa, synthetic construct
WVSGINYNGGYKS

SEQ ID NO: 1760 - protein, 13 aa, synthetic construct
WVASINYNSGYKS

SEQ ID NO: 1761 - protein, 13 aa, synthetic construct
WVSGINYNSGYTS

SEQ ID NO: 1762 - protein, 13 aa, synthetic construct
WVAGINYNGGYKG

SEQ ID NO: 1763 - protein, 13 aa, synthetic construct
WVSNINYNSGYKS

SEQ ID NO: 1764 - protein, 13 aa, synthetic construct
WVSNINYNSGYKS

SEQ ID NO: 1765 - protein, 13 aa, synthetic construct
WVSNINYNSGYKS

SEQ ID NO: 1766 - protein, 13 aa, synthetic construct
WVSGINYNGGYTS

SEQ ID NO: 1767 - protein, 13 aa, synthetic construct
WVAGINYNGGYTS

SEQ ID NO: 1768 - protein, 13 aa, synthetic construct
WVANINYNSGYKG

SEQ ID NO: 1769 - protein, 13 aa, synthetic construct
WVANINYNGGYTG

SEQ ID NO: 1770 - protein, 13 aa, synthetic construct
WVANINYNGGYTG

SEQ ID NO: 1771 - protein, 13 aa, synthetic construct
WVANINYNGGYKS

SEQ ID NO: 1772 - protein, 13 aa, synthetic construct
WVSGINYNGGYTS

SEQ ID NO: 1773 - protein, 13 aa, synthetic construct
WVSGINYNSGYKS

SEQ ID NO: 1774 - protein, 13 aa, synthetic construct
WVSNINYNGGYTS

SEQ ID NO: 1775 - protein, 13 aa, synthetic construct
WVSGINYNGGYTS

SEQ ID NO: 1776 - protein, 13 aa, synthetic construct
WVAGINYNGGYTS

SEQ ID NO: 1777 - protein, 13 aa, synthetic construct
WVSGINYNSGYTG

SEQ ID NO: 1778 - protein, 13 aa, synthetic construct
WVAGINYNGGYKG

SEQ ID NO: 1779 - protein, 13 aa, synthetic construct
WVAGINYNSGYTG

SEQ ID NO: 1780 - protein, 13 aa, synthetic construct
WVAGINYNGGYKG

SEQ ID NO: 1781 - protein, 13 aa, synthetic construct
WVSGINYNGGYTS

SEQ ID NO: 1782 - protein, 13 aa, synthetic construct
WVANINYNSGYKG

SEQ ID NO: 1783 - protein, 13 aa, synthetic construct
WVSGINYNGGYTG

SEQ ID NO: 1784 - protein, 13 aa, synthetic construct
WVSSINYNGGYKG

SEQ ID NO: 1785 - protein, 13 aa, synthetic construct
WVSGINYNSGYKS

SEQ ID NO: 1786 - protein, 13 aa, synthetic construct
WVSNINYNGGYTG

SEQ ID NO: 1787 - protein, 13 aa, synthetic construct
WVSGINYNSGYTS

SEQ ID NO: 1788 - protein, 13 aa, synthetic construct
WVSNINYNGGYKG

SEQ ID NO: 1789 - protein, 13 aa, synthetic construct
WVAGINYNGGYTS

SEQ ID NO: 1790 - protein, 13 aa, synthetic construct
WVANINYNGGYKG

SEQ ID NO: 1791 - protein, 13 aa, synthetic construct
WVANINYNGGYTG

SEQ ID NO: 1792 - protein, 13 aa, synthetic construct
WVSSINYNGGYTS

SEQ ID NO: 1793 - protein, 13 aa, synthetic construct
WVAGINYNGGYKS

SEQ ID NO: 1794 - protein, 13 aa, synthetic construct
WVSGINYNSGYTS

SEQ ID NO: 1795 - protein, 13 aa, synthetic construct
WVASINYNSGYTS

SEQ ID NO: 1796 - protein, 13 aa, synthetic construct
WVSGINYNSGYKG

SEQ ID NO: 1797 - protein, 13 aa, synthetic construct
WVANINYNGGYTS

SEQ ID NO: 1798 - protein, 13 aa, synthetic construct
WVANINYNGGYTG

SEQ ID NO: 1799 - protein, 13 aa, synthetic construct
WVAGINYNGGYTS

SEQ ID NO: 1800 - protein, 13 aa, synthetic construct
WVSNINYNGGYKS

SEQ ID NO: 1801 - protein, 13 aa, synthetic construct
WVSSINYNGGYTS

SEQ ID NO: 1802 - protein, 13 aa, synthetic construct
WVAGINYNSGYTS

SEQ ID NO: 1803 - protein, 13 aa, synthetic construct
WVAGINYNGGYKS

SEQ ID NO: 1804 - protein, 13 aa, synthetic construct
WVAGINYNGGYTS

SEQ ID NO: 1805 - protein, 13 aa, synthetic construct
WVSNINYNGGYKG

SEQ ID NO: 1806 - protein, 13 aa, synthetic construct
WVAGINYNGGYTS

SEQ ID NO: 1807 - protein, 13 aa, synthetic construct
WVSNINYNSGYTG

SEQ ID NO: 1808 - protein, 13 aa, synthetic construct
WVAGINYNGGYTG

SEQ ID NO: 1809 - protein, 13 aa, synthetic construct
WVAGINYNSGYKG

SEQ ID NO: 1810 - protein, 13 aa, synthetic construct
WVANINYNGGYTS

SEQ ID NO: 1811 - protein, 13 aa, synthetic construct
WVSGINYNGGYTG

SEQ ID NO: 1812 - protein, 13 aa, synthetic construct
WVSGINYNSGYTG

SEQ ID NO: 1813 - protein, 13 aa, synthetic construct
WVSGINYNGGYKS

SEQ ID NO: 1814 - protein, 13 aa, synthetic construct
WVSNINYNGGYTS

SEQ ID NO: 1815 - protein, 13 aa, synthetic construct
WVSGINYNSGYTS

SEQ ID NO: 1816 - protein, 13 aa, synthetic construct
WVANINYNGGYTS

SEQ ID NO: 1817 - protein, 13 aa, synthetic construct
WVSNINYNSGYTS

SEQ ID NO: 1818 - protein, 13 aa, synthetic construct
WVAGINYNGGYTG

SEQ ID NO: 1819 - protein, 13 aa, synthetic construct
WVAGINYNGGYTS

SEQ ID NO: 1820 - protein, 13 aa, synthetic construct
WVAGINYNGGYKS

SEQ ID NO: 1821 - protein, 13 aa, synthetic construct
WVSNINYNSGYTG

SEQ ID NO: 1822 - protein, 13 aa, synthetic construct
WVANINYNSGYKG

SEQ ID NO: 1823 - protein, 13 aa, synthetic construct
WVSGINYNGGYKG

SEQ ID NO: 1824 - protein, 13 aa, synthetic construct
WVSNINYNGGYTG

SEQ ID NO: 1825 - protein, 13 aa, synthetic construct
WVSGINYNSGYTS

SEQ ID NO: 1826 - protein, 13 aa, synthetic construct
WVAGINYNSGYKG

SEQ ID NO: 1827 - protein, 13 aa, synthetic construct
WVAGINYNGGYTG

SEQ ID NO: 1828 - protein, 13 aa, synthetic construct
WVSNINYNGGYTS

SEQ ID NO: 1829 - protein, 13 aa, synthetic construct
WVSSINYNSGYTS

SEQ ID NO: 1830 - protein, 13 aa, synthetic construct
WVSGINYNSGYKG

SEQ ID NO: 1831 - protein, 13 aa, synthetic construct
WVANINYNSGYTG

SEQ ID NO: 1832 - protein, 13 aa, synthetic construct
WVAGINYNGGYTG

SEQ ID NO: 1833 - protein, 13 aa, synthetic construct
WVANINYNGGYTS

SEQ ID NO: 1834 - protein, 13 aa, synthetic construct
WVSGINYNSGYTG

SEQ ID NO: 1835 - protein, 13 aa, synthetic construct
WVSGINYNSGYKS

SEQ ID NO: 1836 - protein, 13 aa, synthetic construct
WVSGINYNSGYKG

SEQ ID NO: 1837 - protein, 13 aa, synthetic construct
WVSGINYNSGYKG

SEQ ID NO: 1838 - protein, 13 aa, synthetic construct
WVSGINYNGGYKS

SEQ ID NO: 1839 - protein, 13 aa, synthetic construct
WVSNINYNSGYKG

SEQ ID NO: 1840 - protein, 13 aa, synthetic construct
WVSGINYNGGYKG

SEQ ID NO: 1841 - protein, 13 aa, synthetic construct
WVSNINYNGGYTS

SEQ ID NO: 1842 - protein, 13 aa, synthetic construct
WVANINYNGGYTS

SEQ ID NO: 1843 - protein, 13 aa, synthetic construct
WVANINYNGGYTG

SEQ ID NO: 1844 - protein, 13 aa, synthetic construct
WVSNINYNGGYKS

SEQ ID NO: 1845 - protein, 13 aa, synthetic construct
WVSNINYNGGYTS

SEQ ID NO: 1846 - protein, 13 aa, synthetic construct
WVANINYNGGYTG

SEQ ID NO: 1847 - protein, 13 aa, synthetic construct
WVANINYNGGYKG

SEQ ID NO: 1848 - protein, 13 aa, synthetic construct
WVSGINYNSGYKG

SEQ ID NO: 1849 - protein, 13 aa, synthetic construct
WVSNINYNSGYTG

SEQ ID NO: 1850 - protein, 13 aa, synthetic construct
WVAGINYNSGYKG

SEQ ID NO: 1851 - protein, 13 aa, synthetic construct
WVAGINYNGGYTG

SEQ ID NO: 1852 - protein, 13 aa, synthetic construct
WVSGINYNSGYTS

SEQ ID NO: 1853 - protein, 13 aa, synthetic construct
WVSSINYNSGYKG

SEQ ID NO: 1854 - protein, 13 aa, synthetic construct
WVSGINYNSGYKG

SEQ ID NO: 1855 - protein, 13 aa, synthetic construct
WVSGINYNSGYTG

SEQ ID NO: 1856 - protein, 13 aa, synthetic construct
WVAGINYNGGYTS

SEQ ID NO: 1857 - protein, 13 aa, synthetic construct
WVSGINYNGGYTS

SEQ ID NO: 1858 - protein, 13 aa, synthetic construct
WVAGINYNGGYTS

SEQ ID NO: 1859 - protein, 13 aa, synthetic construct
WVAGINYNGGYTS

SEQ ID NO: 1860 - protein, 13 aa, synthetic construct
WVAGINYNGGYKS

SEQ ID NO: 1861 - protein, 13 aa, synthetic construct
WVSNINYNGGYTS

SEQ ID NO: 1862 - protein, 13 aa, synthetic construct
WVSNINYNGGYTG

SEQ ID NO: 1863 - protein, 13 aa, synthetic construct
WVANINYNSGYTS

SEQ ID NO: 1864 - protein, 13 aa, synthetic construct
WVSGINYNSGYKS

SEQ ID NO: 1865 - protein, 13 aa, synthetic construct
WVSGINYNGGYTS

SEQ ID NO: 1866 - protein, 13 aa, synthetic construct
WVSNINYNGGYTG

SEQ ID NO: 1867 - protein, 13 aa, synthetic construct
WVAGINYNGGYTG

SEQ ID NO: 1868 - protein, 13 aa, synthetic construct
WVASINYNGGYTS

SEQ ID NO: 1869 - protein, 13 aa, synthetic construct
WVSGINYNSGYKS

SEQ ID NO: 1870 - protein, 13 aa, synthetic construct
WVSGINYNSGYKS

SEQ ID NO: 1871 - protein, 13 aa, synthetic construct
WVSGINYNSGYTS

SEQ ID NO: 1872 - protein, 13 aa, synthetic construct
WVSNINYNGGYTG

SEQ ID NO: 1873 - protein, 13 aa, synthetic construct
WVANINYNGGYTG

SEQ ID NO: 1874 - protein, 13 aa, synthetic construct
WVANINYNSGYKS

SEQ ID NO: 1875 - protein, 13 aa, synthetic construct
WVANINYNGGYKG

SEQ ID NO: 1876 - protein, 13 aa, synthetic construct
WVASINYNSGYTS

SEQ ID NO: 1877 - protein, 13 aa, synthetic construct
WVSNINYNGGYTG

SEQ ID NO: 1878 - protein, 13 aa, synthetic construct
WVASINYNSGYTS

SEQ ID NO: 1879 - protein, 13 aa, synthetic construct
WVANINYNSGYTG

SEQ ID NO: 1880 - protein, 13 aa, synthetic construct
WVSGINYNSGYKG

SEQ ID NO: 1881 - protein, 13 aa, synthetic construct
WVSSINYNSGYTS

SEQ ID NO: 1882 - protein, 13 aa, synthetic construct
WVSGINYNSGYKS

SEQ ID NO: 1883 - protein, 13 aa, synthetic construct
WVAGINYNSGYKG

SEQ ID NO: 1884 - protein, 13 aa, synthetic construct
WVAGINYNGGYKG

SEQ ID NO: 1885 - protein, 13 aa, synthetic construct
WVSNINYNGGYTS

SEQ ID NO: 1886 - protein, 13 aa, synthetic construct
WVSNINYNSGYKG

SEQ ID NO: 1887 - protein, 13 aa, synthetic construct
WVANINYNSGYKG

SEQ ID NO: 1888 - protein, 13 aa, synthetic construct
WVASINYNGGYTG

SEQ ID NO: 1889 - protein, 13 aa, synthetic construct
WVANINYNGGYTG

SEQ ID NO: 1890 - protein, 13 aa, synthetic construct
WVANINYNSGYKG

SEQ ID NO: 1891 - protein, 13 aa, synthetic construct
WVSGINYNGGYTS

SEQ ID NO: 1892 - protein, 13 aa, synthetic construct
WVAGINYNGGYTS

SEQ ID NO: 1893 - protein, 13 aa, synthetic construct
WVSGINYNSGYTS

SEQ ID NO: 1894 - protein, 13 aa, synthetic construct
WVAGINYNGGYTG

SEQ ID NO: 1895 - protein, 13 aa, synthetic construct
WVSNINYNGGYKG

SEQ ID NO: 1896 - protein, 13 aa, synthetic construct
WVANINYNGGYTG

SEQ ID NO: 1897 - protein, 13 aa, synthetic construct
WVANINYNGGYTG

SEQ ID NO: 1898 - protein, 13 aa, synthetic construct
WVAGINYNGGYTS

SEQ ID NO: 1899 - protein, 13 aa, synthetic construct
WVANINYNGGYTG

SEQ ID NO: 1900 - protein, 13 aa, synthetic construct
WVSNINYNSGYTG

SEQ ID NO: 1901 - protein, 13 aa, synthetic construct
WVANINYNGGYTS

SEQ ID NO: 1902 - protein, 13 aa, synthetic construct
WVSGINYNSGYKG

SEQ ID NO: 1903 - protein, 13 aa, synthetic construct
WVANINYNGGYTG

SEQ ID NO: 1904 - protein, 13 aa, synthetic construct
WVSGINYNSGYKS

SEQ ID NO: 1905 - protein, 12 aa, synthetic construct
ARSANWHDTALD

SEQ ID NO: 1906 - protein, 12 aa, synthetic construct
ARSANWHDTALD

SEQ ID NO: 1907 - protein, 12 aa, synthetic construct
AKSANWHDTHLD

SEQ ID NO: 1908 - protein, 12 aa, synthetic construct
ARSANWHDTALD

SEQ ID NO: 1909 - protein, 12 aa, synthetic construct
ARSANWHDTALD

SEQ ID NO: 1910 - protein, 12 aa, synthetic construct
ARSANWHDTALD

SEQ ID NO: 1911 - protein, 12 aa, synthetic construct
ARSANWHDTALD

SEQ ID NO: 1912 - protein, 12 aa, synthetic construct
ARSANWHDTHLD

SEQ ID NO: 1913 - protein, 12 aa, synthetic construct
ARSANWHDTALD

SEQ ID NO: 1914 - protein, 12 aa, synthetic construct
ARSANWHDTHLD

SEQ ID NO: 1915 - protein, 12 aa, synthetic construct
ARSANWHDTALD

SEQ ID NO: 1916 - protein, 12 aa, synthetic construct
ARSANWHDTALD

SEQ ID NO: 1917 - protein, 12 aa, synthetic construct
ARSANWHDTALD

SEQ ID NO: 1918 - protein, 12 aa, synthetic construct
ARSANWHDTALD

SEQ ID NO: 1919 - protein, 12 aa, synthetic construct
ARSANWHDTALD

SEQ ID NO: 1920 - protein, 12 aa, synthetic construct
ARSANWHDTALD

SEQ ID NO: 1921 - protein, 12 aa, synthetic construct
AKSANWHDTHLD

SEQ ID NO: 1922 - protein, 12 aa, synthetic construct
ARSANWHDTALD

SEQ ID NO: 1923 - protein, 12 aa, synthetic construct
ARSANWHDTHLD

SEQ ID NO: 1924 - protein, 12 aa, synthetic construct
ARSANWHDTALD

SEQ ID NO: 1925 - protein, 12 aa, synthetic construct
ARSANWHDTHLD

SEQ ID NO: 1926 - protein, 12 aa, synthetic construct
ARSANWHDTALD

SEQ ID NO: 1927 - protein, 12 aa, synthetic construct
ARSANWHDTALD

SEQ ID NO: 1928 - protein, 12 aa, synthetic construct
ARSANWHDTHLD

SEQ ID NO: 1929 - protein, 12 aa, synthetic construct
ARSANWHDTALD

SEQ ID NO: 1930 - protein, 12 aa, synthetic construct
ARSANWHDTALD

SEQ ID NO: 1931 - protein, 12 aa, synthetic construct
ARSANWHDTHLD

SEQ ID NO: 1932 - protein, 12 aa, synthetic construct
ARSANWHDTALD

SEQ ID NO: 1933 - protein, 12 aa, synthetic construct
ARSANWHDTHLD

SEQ ID NO: 1934 - protein, 12 aa, synthetic construct
ARSANWHDTALD

SEQ ID NO: 1935 - protein, 12 aa, synthetic construct
ARSANWHDTHLD

SEQ ID NO: 1936 - protein, 12 aa, synthetic construct
ARSANWHDTALD

SEQ ID NO: 1937 - protein, 12 aa, synthetic construct
ARSANWHDTALD

SEQ ID NO: 1938 - protein, 12 aa, synthetic construct
ARSANWHDTALD

SEQ ID NO: 1939 - protein, 12 aa, synthetic construct
ARSANWHDTHLD

SEQ ID NO: 1940 - protein, 12 aa, synthetic construct
ARSANWHDTALD

SEQ ID NO: 1941 - protein, 12 aa, synthetic construct
ARSANWHDTHLD

SEQ ID NO: 1942 - protein, 12 aa, synthetic construct
ARSANWHDTHLD

SEQ ID NO: 1943 - protein, 12 aa, synthetic construct
ARSANWHDTALD

SEQ ID NO: 1944 - protein, 12 aa, synthetic construct
ARSANWHDTALD

SEQ ID NO: 1945 - protein, 12 aa, synthetic construct
ARSANWHDTALD

SEQ ID NO: 1946 - protein, 12 aa, synthetic construct
ARSANWHDTALD

SEQ ID NO: 1947 - protein, 12 aa, synthetic construct
ARSANWHDTHLD

SEQ ID NO: 1948 - protein, 12 aa, synthetic construct
ARSANWHDTALD

SEQ ID NO: 1949 - protein, 12 aa, synthetic construct
ARSANWHDTALD

SEQ ID NO: 1950 - protein, 12 aa, synthetic construct
ARSANWHDTALD

SEQ ID NO: 1951 - protein, 12 aa, synthetic construct
ARSANWHDTALD

SEQ ID NO: 1952 - protein, 12 aa, synthetic construct
ARSANWHDTALD

SEQ ID NO: 1953 - protein, 12 aa, synthetic construct
ARSANWHDTHLD

SEQ ID NO: 1954 - protein, 12 aa, synthetic construct
ARSANWHDTALD

SEQ ID NO: 1955 - protein, 12 aa, synthetic construct
ARSANWHDTHLD

SEQ ID NO: 1956 - protein, 12 aa, synthetic construct
ARSANWHDTHLD

SEQ ID NO: 1957 - protein, 12 aa, synthetic construct
ARSANWHDTHLD

SEQ ID NO: 1958 - protein, 12 aa, synthetic construct
ARSANWHDTALD

SEQ ID NO: 1959 - protein, 12 aa, synthetic construct
ARSANWHDTALD

SEQ ID NO: 1960 - protein, 12 aa, synthetic construct
ARSANWHDTHLD

SEQ ID NO: 1961 - protein, 12 aa, synthetic construct
ARSANWHDTHLD

SEQ ID NO: 1962 - protein, 12 aa, synthetic construct
ARSANWHDTALD

SEQ ID NO: 1963 - protein, 12 aa, synthetic construct
ARSANWHDTHLD

SEQ ID NO: 1964 - protein, 12 aa, synthetic construct
ARSANWHDTALD

SEQ ID NO: 1965 - protein, 12 aa, synthetic construct
ARSANWHDTALD

SEQ ID NO: 1966 - protein, 12 aa, synthetic construct
ARSANWHDTHLD

SEQ ID NO: 1967 - protein, 12 aa, synthetic construct
ARSANWHDTALD

SEQ ID NO: 1968 - protein, 12 aa, synthetic construct
ARSANWHDTHLD

SEQ ID NO: 1969 - protein, 12 aa, synthetic construct
ARSANWHDTALD

SEQ ID NO: 1970 - protein, 12 aa, synthetic construct
ARSANWHDTHLD

SEQ ID NO: 1971 - protein, 12 aa, synthetic construct
ARSANWHDTALD

SEQ ID NO: 1972 - protein, 12 aa, synthetic construct
ARSANWHDTALD

SEQ ID NO: 1973 - protein, 12 aa, synthetic construct
ARSANWHDTALD

SEQ ID NO: 1974 - protein, 12 aa, synthetic construct
ARSANWHDTHLD

SEQ ID NO: 1975 - protein, 12 aa, synthetic construct
ARSANWHDTHLD

SEQ ID NO: 1976 - protein, 12 aa, synthetic construct
ARSANWHDTALD

SEQ ID NO: 1977 - protein, 12 aa, synthetic construct
ARSANWHDTALD

SEQ ID NO: 1978 - protein, 12 aa, synthetic construct
ARSANWHDTALD

SEQ ID NO: 1979 - protein, 12 aa, synthetic construct
ARSANWHDTALD

SEQ ID NO: 1980 - protein, 12 aa, synthetic construct
ARSANWHDTALD

SEQ ID NO: 1981 - protein, 12 aa, synthetic construct
ARSANWHDTALD

SEQ ID NO: 1982 - protein, 12 aa, synthetic construct
ARSANWHDTALD

SEQ ID NO: 1983 - protein, 12 aa, synthetic construct
ARSANWHDTALD

SEQ ID NO: 1984 - protein, 12 aa, synthetic construct
ARSANWHDTHLD

SEQ ID NO: 1985 - protein, 12 aa, synthetic construct
ARSANWHDTHLD

SEQ ID NO: 1986 - protein, 12 aa, synthetic construct
ARSANWHDTALD

SEQ ID NO: 1987 - protein, 12 aa, synthetic construct
ARSANWHDTALD

SEQ ID NO: 1988 - protein, 12 aa, synthetic construct
AKSANWHDTALD

SEQ ID NO: 1989 - protein, 12 aa, synthetic construct
AKSANWHDTALD

SEQ ID NO: 1990 - protein, 12 aa, synthetic construct
ARSANWHDTHLD

SEQ ID NO: 1991 - protein, 12 aa, synthetic construct
ARSANWHDTALD

SEQ ID NO: 1992 - protein, 12 aa, synthetic construct
ARSANWHDTALD

SEQ ID NO: 1993 - protein, 12 aa, synthetic construct
AKSANWHDTHLD

SEQ ID NO: 1994 - protein, 12 aa, synthetic construct
ARSANWHDTHLD

SEQ ID NO: 1995 - protein, 12 aa, synthetic construct
ARSANWHDTALD

SEQ ID NO: 1996 - protein, 12 aa, synthetic construct
ARSANWHDTALD

SEQ ID NO: 1997 - protein, 12 aa, synthetic construct
ARSANWHDTALD

SEQ ID NO: 1998 - protein, 12 aa, synthetic construct
ARSANWHDTALD

SEQ ID NO: 1999 - protein, 12 aa, synthetic construct
ARSANWHDTALD

SEQ ID NO: 2000 - protein, 12 aa, synthetic construct
ARSANWHDTALD

SEQ ID NO: 2001 - protein, 12 aa, synthetic construct
ARSANWHDTALD

SEQ ID NO: 2002 - protein, 12 aa, synthetic construct
ARSANWHDTALD

SEQ ID NO: 2003 - protein, 12 aa, synthetic construct
ARSANWHDTALD

SEQ ID NO: 2004 - protein, 12 aa, synthetic construct
ARSANWHDTALD

SEQ ID NO: 2005 - protein, 12 aa, synthetic construct
ARSANWHDTALD

SEQ ID NO: 2006 - protein, 12 aa, synthetic construct
ARSANWHDTALD

SEQ ID NO: 2007 - protein, 12 aa, synthetic construct
ARSANWHDTALD

SEQ ID NO: 2008 - protein, 12 aa, synthetic construct
ARSANWHDTALD

SEQ ID NO: 2009 - protein, 12 aa, synthetic construct
ARSANWHDTALD

SEQ ID NO: 2010 - protein, 12 aa, synthetic construct
ARSANWHDTALD

SEQ ID NO: 2011 - protein, 12 aa, synthetic construct
ARSANWHDTALD

SEQ ID NO: 2012 - protein, 12 aa, synthetic construct
ARSANWHDTALD

SEQ ID NO: 2013 - protein, 12 aa, synthetic construct
ARSANWHDTALD

SEQ ID NO: 2014 - protein, 12 aa, synthetic construct
ARSANWHDTALD

SEQ ID NO: 2015 - protein, 12 aa, synthetic construct
ARSANWHDTALD

SEQ ID NO: 2016 - protein, 12 aa, synthetic construct
ARSANWHDTALD

SEQ ID NO: 2017 - protein, 12 aa, synthetic construct
ARSANWHDTALD

SEQ ID NO: 2018 - protein, 12 aa, synthetic construct
ARSANWHDTALD

SEQ ID NO: 2019 - protein, 12 aa, synthetic construct
ARSANWHDTALD

SEQ ID NO: 2020 - protein, 12 aa, synthetic construct
ARSANWHDTALD

SEQ ID NO: 2021 - protein, 12 aa, synthetic construct
ARSANWHDTALD

SEQ ID NO: 2022 - protein, 12 aa, synthetic construct
ARSANWHDTALD

SEQ ID NO: 2023 - protein, 12 aa, synthetic construct
ARSANWHDTALD

SEQ ID NO: 2024 - protein, 12 aa, synthetic construct
ARSANWHDTALD

SEQ ID NO: 2025 - protein, 12 aa, synthetic construct
ARSANWHDTALD

SEQ ID NO: 2026 - protein, 12 aa, synthetic construct
ARSANWHDTALD

SEQ ID NO: 2027 - protein, 12 aa, synthetic construct
ARSANWHDTALD

SEQ ID NO: 2028 - protein, 12 aa, synthetic construct
ARSANWHDTALD

SEQ ID NO: 2029 - protein, 12 aa, synthetic construct
ARSANWHDTALD

SEQ ID NO: 2030 - protein, 12 aa, synthetic construct
ARSANWHDTALD

SEQ ID NO: 2031 - protein, 12 aa, synthetic construct
ARSANWHDTALD

SEQ ID NO: 2032 - protein, 12 aa, synthetic construct
ARSANWHDTALD

SEQ ID NO: 2033 - protein, 12 aa, synthetic construct
ARSANWHDTALD

SEQ ID NO: 2034 - protein, 12 aa, synthetic construct
AKSANWHDTALD

SEQ ID NO: 2035 - protein, 12 aa, synthetic construct
ARSANWHDTALD

SEQ ID NO: 2036 - protein, 12 aa, synthetic construct
ARSANWHDTALD

SEQ ID NO: 2037 - protein, 12 aa, synthetic construct
ARSANWHDTALD

SEQ ID NO: 2038 - protein, 12 aa, synthetic construct
ARSANWHDTALD

SEQ ID NO: 2039 - protein, 12 aa, synthetic construct
ARSANWHDTALD

SEQ ID NO: 2040 - protein, 12 aa, synthetic construct
ARSANWHDTALD

SEQ ID NO: 2041 - protein, 12 aa, synthetic construct
ARSANWHDTALD

SEQ ID NO: 2042 - protein, 12 aa, synthetic construct
ARSANWHDTALD

SEQ ID NO: 2043 - protein, 12 aa, synthetic construct
ARSANWHDTHLD

SEQ ID NO: 2044 - protein, 12 aa, synthetic construct
ARSANWHDTALD

SEQ ID NO: 2045 - protein, 12 aa, synthetic construct
ARSANWHDTALD

SEQ ID NO: 2046 - protein, 12 aa, synthetic construct
ARSANWHDTALD

SEQ ID NO: 2047 - protein, 12 aa, synthetic construct
ARSANWHDTALD

SEQ ID NO: 2048 - protein, 12 aa, synthetic construct
ARSANWHDTALD

SEQ ID NO: 2049 - protein, 12 aa, synthetic construct
ARSANWHDTALD

SEQ ID NO: 2050 - protein, 12 aa, synthetic construct
ARSANWHDTALD

SEQ ID NO: 2051 - protein, 12 aa, synthetic construct
ARSANWHDTALD

SEQ ID NO: 2052 - protein, 12 aa, synthetic construct
ARSANWHDTALD

SEQ ID NO: 2053 - protein, 12 aa, synthetic construct
ARSANWHDTALD

SEQ ID NO: 2054 - protein, 12 aa, synthetic construct
ARSANWHDTALD

SEQ ID NO: 2055 - protein, 12 aa, synthetic construct
ARSANWHDTALD

SEQ ID NO: 2056 - protein, 12 aa, synthetic construct
ARSANWHDTALD

SEQ ID NO: 2057 - protein, 12 aa, synthetic construct
ARSANWHDTALD

SEQ ID NO: 2058 - protein, 12 aa, synthetic construct
ARSANWHDTALD

SEQ ID NO: 2059 - protein, 12 aa, synthetic construct
ARSANWHDTALD

SEQ ID NO: 2060 - protein, 12 aa, synthetic construct
ARSANWHDTALD

SEQ ID NO: 2061 - protein, 12 aa, synthetic construct
ARSANWHDTALD

SEQ ID NO: 2062 - protein, 12 aa, synthetic construct
ARSANWHDTALD

SEQ ID NO: 2063 - protein, 12 aa, synthetic construct
ARSANWHDTALD

SEQ ID NO: 2064 - protein, 12 aa, synthetic construct
ARSANWHDTALD

SEQ ID NO: 2065 - protein, 12 aa, synthetic construct
ARSANWHDTHLD

SEQ ID NO: 2066 - protein, 12 aa, synthetic construct
ARSANWHDTALD

SEQ ID NO: 2067 - protein, 12 aa, synthetic construct
ARSANWHDTALD

SEQ ID NO: 2068 - protein, 12 aa, synthetic construct
ARSANWHDTALD

SEQ ID NO: 2069 - protein, 12 aa, synthetic construct
ARSANWHDTALD

SEQ ID NO: 2070 - protein, 12 aa, synthetic construct
ARSANWHDTALD

SEQ ID NO: 2071 - protein, 12 aa, synthetic construct
ARSANWHDTALD

SEQ ID NO: 2072 - protein, 12 aa, synthetic construct
ARSANWHDTALD

SEQ ID NO: 2073 - protein, 12 aa, synthetic construct
ARSANWHDTALD

SEQ ID NO: 2074 - protein, 12 aa, synthetic construct
ARSANWHDTALD

SEQ ID NO: 2075 - protein, 12 aa, synthetic construct
ARSANWHDTALD

SEQ ID NO: 2076 - protein, 12 aa, synthetic construct
ARSANWHDTALD

SEQ ID NO: 2077 - protein, 12 aa, synthetic construct
ARSANWHDTALD

SEQ ID NO: 2078 - protein, 12 aa, synthetic construct
ARSANWHDTALD

SEQ ID NO: 2079 - protein, 12 aa, synthetic construct
ARSANWHDTALD

SEQ ID NO: 2080 - protein, 12 aa, synthetic construct
ARSANWHDTALD

SEQ ID NO: 2081 - protein, 12 aa, synthetic construct
ARSANWHDTALD

SEQ ID NO: 2082 - protein, 12 aa, synthetic construct
ARSANWHDTALD

SEQ ID NO: 2083 - protein, 12 aa, synthetic construct
ARSANWHDTHLD

SEQ ID NO: 2084 - protein, 12 aa, synthetic construct
ARSANWHDTALD

SEQ ID NO: 2085 - protein, 12 aa, synthetic construct
ARSANWHDTALD

SEQ ID NO: 2086 - protein, 12 aa, synthetic construct
ARSANWHDTALD

SEQ ID NO: 2087 - protein, 12 aa, synthetic construct
ARSANWHDTALD

SEQ ID NO: 2088 - protein, 12 aa, synthetic construct
ARSANWHDTALD

SEQ ID NO: 2089 - protein, 12 aa, synthetic construct
ARSANWHDTALD

SEQ ID NO: 2090 - protein, 12 aa, synthetic construct
ARSANWHDTALD

SEQ ID NO: 2091 - protein, 12 aa, synthetic construct
ARSANWHDTALD

SEQ ID NO: 2092 - protein, 12 aa, synthetic construct
ARSANWHDTALD

SEQ ID NO: 2093 - protein, 12 aa, synthetic construct
ARSANWHDTALD

SEQ ID NO: 2094 - protein, 12 aa, synthetic construct
ARSANWHDTALD

SEQ ID NO: 2095 - protein, 12 aa, synthetic construct
ARSANWHDTALD

SEQ ID NO: 2096 - protein, 12 aa, synthetic construct
ARSANWHDTALD

SEQ ID NO: 2097 - protein, 12 aa, synthetic construct
ARSANWHDTALD

SEQ ID NO: 2098 - protein, 12 aa, synthetic construct
ARSANWHDTHLD

SEQ ID NO: 2099 - protein, 12 aa, synthetic construct
ARSANWHDTHLD

SEQ ID NO: 2100 - protein, 12 aa, synthetic construct
ARSANWHDTALD

SEQ ID NO: 2101 - protein, 12 aa, synthetic construct
ARSANWHDTALD

SEQ ID NO: 2102 - protein, 12 aa, synthetic construct
ARSANWHDTALD

SEQ ID NO: 2103 - protein, 12 aa, synthetic construct
ARSANWHDTHLD

SEQ ID NO: 2104 - protein, 12 aa, synthetic construct
ARSANWHDTALD

SEQ ID NO: 2105 - protein, 12 aa, synthetic construct
ARSANWHDTALD

SEQ ID NO: 2106 - protein, 12 aa, synthetic construct
ARSANWHDTALD

SEQ ID NO: 2107 - protein, 12 aa, synthetic construct
ARSANWHDTALD

SEQ ID NO: 2108 - protein, 12 aa, synthetic construct
ARSANWHDTALD

SEQ ID NO: 2109 - protein, 12 aa, synthetic construct
ARSANWHDTALD

SEQ ID NO: 2110 - protein, 12 aa, synthetic construct
ARSANWHDTALD

SEQ ID NO: 2111 - protein, 12 aa, synthetic construct
ARSANWHDTALD

SEQ ID NO: 2112 - protein, 12 aa, synthetic construct
ARSANWHDTALD

SEQ ID NO: 2113 - protein, 12 aa, synthetic construct
ARSANWHDTALD

SEQ ID NO: 2114 - protein, 12 aa, synthetic construct
ARSANWHDTALD

SEQ ID NO: 2115 - protein, 12 aa, synthetic construct
ARSANWHDTALD

SEQ ID NO: 2116 - protein, 12 aa, synthetic construct
ARSANWHDTALD

SEQ ID NO: 2117 - protein, 12 aa, synthetic construct
ARSANWHDTALD

SEQ ID NO: 2118 - protein, 12 aa, synthetic construct
ARSANWHDTALD

SEQ ID NO: 2119 - protein, 12 aa, synthetic construct
ARSANWHDTALD

SEQ ID NO: 2120 - protein, 12 aa, synthetic construct
ARSANWHDTALD

SEQ ID NO: 2121 - protein, 12 aa, synthetic construct
ARSANWHDTALD

SEQ ID NO: 2122 - protein, 12 aa, synthetic construct
ARSANWHDTALD

SEQ ID NO: 2123 - protein, 12 aa, synthetic construct
ARSANWHDTALD

SEQ ID NO: 2124 - protein, 12 aa, synthetic construct
ARSANWHDTALD

SEQ ID NO: 2125 - protein, 12 aa, synthetic construct
AKSANWHDTALD

SEQ ID NO: 2126 - protein, 12 aa, synthetic construct
ARSANWHDTHLD

SEQ ID NO: 2127 - protein, 12 aa, synthetic construct
ARSANWHDTALD

SEQ ID NO: 2128 - protein, 12 aa, synthetic construct
ARSANWHDTALD

SEQ ID NO: 2129 - protein, 12 aa, synthetic construct
ARSANWHDTALD

SEQ ID NO: 2130 - protein, 12 aa, synthetic construct
ARSANWHDTALD

SEQ ID NO: 2131 - protein, 12 aa, synthetic construct
ARSANWHDTALD

SEQ ID NO: 2132 - protein, 12 aa, synthetic construct
ARSANWHDTALD

SEQ ID NO: 2133 - protein, 12 aa, synthetic construct
ARSANWHDTALD

SEQ ID NO: 2134 - protein, 12 aa, synthetic construct
ARSANWHDTALD

SEQ ID NO: 2135 - protein, 12 aa, synthetic construct
ARSANWHDTALD

SEQ ID NO: 2136 - protein, 12 aa, synthetic construct
ARSANWHDTALD

SEQ ID NO: 2137 - protein, 12 aa, synthetic construct
ARSANWHDTALD

SEQ ID NO: 2138 - protein, 12 aa, synthetic construct
ARSANWHDTALD

SEQ ID NO: 2139 - protein, 12 aa, synthetic construct
ARSANWHDTALD

SEQ ID NO: 2140 - protein, 12 aa, synthetic construct
ARSANWHDTALD

SEQ ID NO: 2141 - protein, 12 aa, synthetic construct
ARSANWHDTALD

SEQ ID NO: 2142 - protein, 12 aa, synthetic construct
ARSANWHDTALD

SEQ ID NO: 2143 - protein, 12 aa, synthetic construct
ARSANWHDTALD

SEQ ID NO: 2144 - protein, 12 aa, synthetic construct
ARSANWHDTALD

SEQ ID NO: 2145 - protein, 12 aa, synthetic construct
ARSANWHDTALD

SEQ ID NO: 2146 - protein, 12 aa, synthetic construct
ARSANWHDTALD

SEQ ID NO: 2147 - protein, 12 aa, synthetic construct
ARSANWHDTALD

SEQ ID NO: 2148 - protein, 12 aa, synthetic construct
ARSANWHDTALD

SEQ ID NO: 2149 - protein, 12 aa, synthetic construct
ARSANWHDTALD

SEQ ID NO: 2150 - protein, 12 aa, synthetic construct
ARSANWHDTALD

SEQ ID NO: 2151 - protein, 12 aa, synthetic construct
ARSANWHDTALD

SEQ ID NO: 2152 - protein, 12 aa, synthetic construct
ARSANWHDTALD

SEQ ID NO: 2153 - protein, 7 aa, synthetic construct
LSYLNWY

SEQ ID NO: 2154 - protein, 7 aa, synthetic construct
LSYLNWY

SEQ ID NO: 2155 - protein, 7 aa, synthetic construct
LTYVNWY

SEQ ID NO: 2156 - protein, 7 aa, synthetic construct
SSYVNWY

SEQ ID NO: 2157 - protein, 7 aa, synthetic construct
LTYVNWY

SEQ ID NO: 2158 - protein, 7 aa, synthetic construct
LTYLNWY

SEQ ID NO: 2159 - protein, 7 aa, synthetic construct
ISYLNWY

SEQ ID NO: 2160 - protein, 7 aa, synthetic construct
VSYLNWY

SEQ ID NO: 2161 - protein, 7 aa, synthetic construct
LSYVNWY

SEQ ID NO: 2162 - protein, 7 aa, synthetic construct
ITYLNWY

SEQ ID NO: 2163 - protein, 7 aa, synthetic construct
VSYVNWY

SEQ ID NO: 2164 - protein, 7 aa, synthetic construct
LSYLNWY

SEQ ID NO: 2165 - protein, 7 aa, synthetic construct
VSYLNWY

SEQ ID NO: 2166 - protein, 7 aa, synthetic construct
VTYLNWY

SEQ ID NO: 2167 - protein, 7 aa, synthetic construct
ISYLNWY

SEQ ID NO: 2168 - protein, 7 aa, synthetic construct
VSYVNWY

SEQ ID NO: 2169 - protein, 7 aa, synthetic construct
LSYLNWY

SEQ ID NO: 2170 - protein, 7 aa, synthetic construct
LTYVNWY

SEQ ID NO: 2171 - protein, 7 aa, synthetic construct
VSYLNWY

SEQ ID NO: 2172 - protein, 7 aa, synthetic construct
LSYVNWY

SEQ ID NO: 2173 - protein, 7 aa, synthetic construct
LTYVNWY

SEQ ID NO: 2174 - protein, 7 aa, synthetic construct
LTYVNWY

SEQ ID NO: 2175 - protein, 7 aa, synthetic construct
ITYVNWY

SEQ ID NO: 2176 - protein, 7 aa, synthetic construct
LTYLNWY

SEQ ID NO: 2177 - protein, 7 aa, synthetic construct
LSYVNWY

SEQ ID NO: 2178 - protein, 7 aa, synthetic construct
SSYVNWY

SEQ ID NO: 2179 - protein, 7 aa, synthetic construct
VTYVNWY

SEQ ID NO: 2180 - protein, 7 aa, synthetic construct
LTYLNWY

SEQ ID NO: 2181 - protein, 7 aa, synthetic construct
ITYVNWY

SEQ ID NO: 2182 - protein, 7 aa, synthetic construct
VSYVNWY

SEQ ID NO: 2183 - protein, 7 aa, synthetic construct
VSYLNWY

SEQ ID NO: 2184 - protein, 7 aa, synthetic construct
ISYLNWY

SEQ ID NO: 2185 - protein, 7 aa, synthetic construct
LTYVNWY

SEQ ID NO: 2186 - protein, 7 aa, synthetic construct
SSYVNWY

SEQ ID NO: 2187 - protein, 7 aa, synthetic construct
LSYVNWY

SEQ ID NO: 2188 - protein, 7 aa, synthetic construct
LSYVNWY

SEQ ID NO: 2189 - protein, 7 aa, synthetic construct
LTYLNWY

SEQ ID NO: 2190 - protein, 7 aa, synthetic construct
ITYLNWY

SEQ ID NO: 2191 - protein, 7 aa, synthetic construct
ITYLNWY

SEQ ID NO: 2192 - protein, 7 aa, synthetic construct
ISYVNWY

SEQ ID NO: 2193 - protein, 7 aa, synthetic construct
LSYLNWY

SEQ ID NO: 2194 - protein, 7 aa, synthetic construct
ISYVNWY

SEQ ID NO: 2195 - protein, 7 aa, synthetic construct
LSYVNWY

SEQ ID NO: 2196 - protein, 7 aa, synthetic construct
VSYVNWY

SEQ ID NO: 2197 - protein, 7 aa, synthetic construct
ITYLNWY

SEQ ID NO: 2198 - protein, 7 aa, synthetic construct
LSYLNWY

SEQ ID NO: 2199 - protein, 7 aa, synthetic construct
VTYLNWY

SEQ ID NO: 2200 - protein, 7 aa, synthetic construct
LTYLNWY

SEQ ID NO: 2201 - protein, 7 aa, synthetic construct
ISYVNWY

SEQ ID NO: 2202 - protein, 7 aa, synthetic construct
LTYLNWY

SEQ ID NO: 2203 - protein, 7 aa, synthetic construct
LTYLNWY

SEQ ID NO: 2204 - protein, 7 aa, synthetic construct
LSYVNWY

SEQ ID NO: 2205 - protein, 7 aa, synthetic construct
LSYLNWY

SEQ ID NO: 2206 - protein, 7 aa, synthetic construct
ISYLNWY

SEQ ID NO: 2207 - protein, 7 aa, synthetic construct
LSYVNWY

SEQ ID NO: 2208 - protein, 7 aa, synthetic construct
LSYLNWY

SEQ ID NO: 2209 - protein, 7 aa, synthetic construct
SSYLNWY

SEQ ID NO: 2210 - protein, 7 aa, synthetic construct
LSYLNWY

SEQ ID NO: 2211 - protein, 7 aa, synthetic construct
VSYVNWY

SEQ ID NO: 2212 - protein, 7 aa, synthetic construct
LSYVNWY

SEQ ID NO: 2213 - protein, 7 aa, synthetic construct
ISYVNWY

SEQ ID NO: 2214 - protein, 7 aa, synthetic construct
SSYLNWY

SEQ ID NO: 2215 - protein, 7 aa, synthetic construct
VSYLNWY

SEQ ID NO: 2216 - protein, 7 aa, synthetic construct
LTYVNWY

SEQ ID NO: 2217 - protein, 7 aa, synthetic construct
ISYVNWY

SEQ ID NO: 2218 - protein, 7 aa, synthetic construct
ITYLNWY

SEQ ID NO: 2219 - protein, 7 aa, synthetic construct
ISYVNWY

SEQ ID NO: 2220 - protein, 7 aa, synthetic construct
ISYLNWY

SEQ ID NO: 2221 - protein, 7 aa, synthetic construct
VSYLNWY

SEQ ID NO: 2222 - protein, 7 aa, synthetic construct
LTYLNWY

SEQ ID NO: 2223 - protein, 7 aa, synthetic construct
LSYVNWY

SEQ ID NO: 2224 - protein, 7 aa, synthetic construct
SSYLNWY

SEQ ID NO: 2225 - protein, 7 aa, synthetic construct
ISYLNWY

SEQ ID NO: 2226 - protein, 7 aa, synthetic construct
VSYLNWY

SEQ ID NO: 2227 - protein, 7 aa, synthetic construct
LSYLNWY

SEQ ID NO: 2228 - protein, 7 aa, synthetic construct
LSYLNWY

SEQ ID NO: 2229 - protein, 7 aa, synthetic construct
STYVNWY

SEQ ID NO: 2230 - protein, 7 aa, synthetic construct
LTYLNWY

SEQ ID NO: 2231 - protein, 7 aa, synthetic construct
LTYLNWY

SEQ ID NO: 2232 - protein, 7 aa, synthetic construct
LSYLNWY

SEQ ID NO: 2233 - protein, 7 aa, synthetic construct
LTYLNWY

SEQ ID NO: 2234 - protein, 7 aa, synthetic construct
LSYVNWY

SEQ ID NO: 2235 - protein, 7 aa, synthetic construct
LSYLNWY

SEQ ID NO: 2236 - protein, 7 aa, synthetic construct
LSYLNWY

SEQ ID NO: 2237 - protein, 7 aa, synthetic construct
ISYLNWY

SEQ ID NO: 2238 - protein, 7 aa, synthetic construct
VSYVNWY

SEQ ID NO: 2239 - protein, 7 aa, synthetic construct
LTYLNWY

SEQ ID NO: 2240 - protein, 7 aa, synthetic construct
SSYVNWY

SEQ ID NO: 2241 - protein, 7 aa, synthetic construct
VSYVNWY

SEQ ID NO: 2242 - protein, 7 aa, synthetic construct
LSYVNWY

SEQ ID NO: 2243 - protein, 7 aa, synthetic construct
LTYLNWY

SEQ ID NO: 2244 - protein, 7 aa, synthetic construct
LSYLNWY

SEQ ID NO: 2245 - protein, 7 aa, synthetic construct
LTYLNWY

SEQ ID NO: 2246 - protein, 7 aa, synthetic construct
LTYLNWY

SEQ ID NO: 2247 - protein, 7 aa, synthetic construct
LTYVNWY

SEQ ID NO: 2248 - protein, 7 aa, synthetic construct
LTYLNWY

SEQ ID NO: 2249 - protein, 7 aa, synthetic construct
LSYLNWY

SEQ ID NO: 2250 - protein, 7 aa, synthetic construct
LSYVNWY

SEQ ID NO: 2251 - protein, 7 aa, synthetic construct
LSYLNWY

SEQ ID NO: 2252 - protein, 7 aa, synthetic construct
VSYVNWY

SEQ ID NO: 2253 - protein, 7 aa, synthetic construct
ISYLNWY

SEQ ID NO: 2254 - protein, 7 aa, synthetic construct
ISYLNWY

SEQ ID NO: 2255 - protein, 7 aa, synthetic construct
LTYVNWY

SEQ ID NO: 2256 - protein, 7 aa, synthetic construct
VSYLNWY

SEQ ID NO: 2257 - protein, 7 aa, synthetic construct
VSYVNWY

SEQ ID NO: 2258 - protein, 7 aa, synthetic construct
VSYVNWY

SEQ ID NO: 2259 - protein, 7 aa, synthetic construct
VTYLNWY

SEQ ID NO: 2260 - protein, 7 aa, synthetic construct
ISYLNWY

SEQ ID NO: 2261 - protein, 7 aa, synthetic construct
LSYVNWY

SEQ ID NO: 2262 - protein, 7 aa, synthetic construct
LTYVNWY

SEQ ID NO: 2263 - protein, 7 aa, synthetic construct
LSYVNWY

SEQ ID NO: 2264 - protein, 7 aa, synthetic construct
LTYLNWY

SEQ ID NO: 2265 - protein, 7 aa, synthetic construct
LTYVNWY

SEQ ID NO: 2266 - protein, 7 aa, synthetic construct
VSYVNWY

SEQ ID NO: 2267 - protein, 7 aa, synthetic construct
VSYVNWY

SEQ ID NO: 2268 - protein, 7 aa, synthetic construct
LSYVNWY

SEQ ID NO: 2269 - protein, 7 aa, synthetic construct
STYLNWY

SEQ ID NO: 2270 - protein, 7 aa, synthetic construct
LSYLNWY

SEQ ID NO: 2271 - protein, 7 aa, synthetic construct
ITYLNWY

SEQ ID NO: 2272 - protein, 7 aa, synthetic construct
LTYLNWY

SEQ ID NO: 2273 - protein, 7 aa, synthetic construct
LTYLNWY

SEQ ID NO: 2274 - protein, 7 aa, synthetic construct
LTYLNWY

SEQ ID NO: 2275 - protein, 7 aa, synthetic construct
LSYVNWY

SEQ ID NO: 2276 - protein, 7 aa, synthetic construct
SNYLNWY

SEQ ID NO: 2277 - protein, 7 aa, synthetic construct
ISYLNWY

SEQ ID NO: 2278 - protein, 7 aa, synthetic construct
LTYLNWY

SEQ ID NO: 2279 - protein, 7 aa, synthetic construct
VSYLNWY

SEQ ID NO: 2280 - protein, 7 aa, synthetic construct
LTYLNWY

SEQ ID NO: 2281 - protein, 7 aa, synthetic construct
LSYLNWY

SEQ ID NO: 2282 - protein, 7 aa, synthetic construct
LSYVNWY

SEQ ID NO: 2283 - protein, 7 aa, synthetic construct
VSYVNWY

SEQ ID NO: 2284 - protein, 7 aa, synthetic construct
LSYLNWY

SEQ ID NO: 2285 - protein, 7 aa, synthetic construct
VSYLNWY

SEQ ID NO: 2286 - protein, 7 aa, synthetic construct
VSYLNWY

SEQ ID NO: 2287 - protein, 7 aa, synthetic construct
LTYVNWY

SEQ ID NO: 2288 - protein, 7 aa, synthetic construct
LSYVNWY

SEQ ID NO: 2289 - protein, 7 aa, synthetic construct
LSYVNWY

SEQ ID NO: 2290 - protein, 7 aa, synthetic construct
SSYLNWY

SEQ ID NO: 2291 - protein, 7 aa, synthetic construct
VSYLNWY

SEQ ID NO: 2292 - protein, 7 aa, synthetic construct
ISYLNWY

SEQ ID NO: 2293 - protein, 7 aa, synthetic construct
VSYVNWY

SEQ ID NO: 2294 - protein, 7 aa, synthetic construct
LSYLNWY

SEQ ID NO: 2295 - protein, 7 aa, synthetic construct
LTYLNWY

SEQ ID NO: 2296 - protein, 7 aa, synthetic construct
LSYLNWY

SEQ ID NO: 2297 - protein, 7 aa, synthetic construct
LSYLNWY

SEQ ID NO: 2298 - protein, 7 aa, synthetic construct
LSYVNWY

SEQ ID NO: 2299 - protein, 7 aa, synthetic construct
LTYVNWY

SEQ ID NO: 2300 - protein, 7 aa, synthetic construct
LTYVNWY

SEQ ID NO: 2301 - protein, 7 aa, synthetic construct
LSYLNWY

SEQ ID NO: 2302 - protein, 7 aa, synthetic construct
ISYVNWY

SEQ ID NO: 2303 - protein, 7 aa, synthetic construct
LTYLNWY

SEQ ID NO: 2304 - protein, 7 aa, synthetic construct
LTYVNWY

SEQ ID NO: 2305 - protein, 7 aa, synthetic construct
LSYLNWY

SEQ ID NO: 2306 - protein, 7 aa, synthetic construct
VSYLNWY

SEQ ID NO: 2307 - protein, 7 aa, synthetic construct
VSYVNWY

SEQ ID NO: 2308 - protein, 7 aa, synthetic construct
SSYLNWY

SEQ ID NO: 2309 - protein, 7 aa, synthetic construct
SSYVNWY

SEQ ID NO: 2310 - protein, 7 aa, synthetic construct
LTYVNWY

SEQ ID NO: 2311 - protein, 7 aa, synthetic construct
LTYLNWY

SEQ ID NO: 2312 - protein, 7 aa, synthetic construct
LSYVNWY

SEQ ID NO: 2313 - protein, 7 aa, synthetic construct
LSYLNWY

SEQ ID NO: 2314 - protein, 7 aa, synthetic construct
LTYLNWY

SEQ ID NO: 2315 - protein, 7 aa, synthetic construct
LSYLNWY

SEQ ID NO: 2316 - protein, 7 aa, synthetic construct
LSYVNWY

SEQ ID NO: 2317 - protein, 7 aa, synthetic construct
LTYVNWY

SEQ ID NO: 2318 - protein, 7 aa, synthetic construct
LTYLNWY

SEQ ID NO: 2319 - protein, 7 aa, synthetic construct
LSYVNWY

SEQ ID NO: 2320 - protein, 7 aa, synthetic construct
VSYVNWY

SEQ ID NO: 2321 - protein, 7 aa, synthetic construct
LSYLNWY

SEQ ID NO: 2322 - protein, 7 aa, synthetic construct
LTYLNWY

SEQ ID NO: 2323 - protein, 7 aa, synthetic construct
LTYVNWY

SEQ ID NO: 2324 - protein, 7 aa, synthetic construct
LSYLNWY

SEQ ID NO: 2325 - protein, 7 aa, synthetic construct
VSYVNWY

SEQ ID NO: 2326 - protein, 7 aa, synthetic construct
LSYVNWY

SEQ ID NO: 2327 - protein, 7 aa, synthetic construct
ISYVNWY

SEQ ID NO: 2328 - protein, 7 aa, synthetic construct
VSYVNWY

SEQ ID NO: 2329 - protein, 7 aa, synthetic construct
ISYLNWY

SEQ ID NO: 2330 - protein, 7 aa, synthetic construct
LTYVNWY

SEQ ID NO: 2331 - protein, 7 aa, synthetic construct
LSYVNWY

SEQ ID NO: 2332 - protein, 7 aa, synthetic construct
LSYLNWY

SEQ ID NO: 2333 - protein, 7 aa, synthetic construct
LSYLNWY

SEQ ID NO: 2334 - protein, 7 aa, synthetic construct
LSYVNWY

SEQ ID NO: 2335 - protein, 7 aa, synthetic construct
LSYVNWY

SEQ ID NO: 2336 - protein, 7 aa, synthetic construct
VSYVNWY

SEQ ID NO: 2337 - protein, 7 aa, synthetic construct
LSYVNWY

SEQ ID NO: 2338 - protein, 7 aa, synthetic construct
LTYVNWY

SEQ ID NO: 2339 - protein, 7 aa, synthetic construct
LSYVNWY

SEQ ID NO: 2340 - protein, 7 aa, synthetic construct
VSYVNWY

SEQ ID NO: 2341 - protein, 7 aa, synthetic construct
LSYLNWY

SEQ ID NO: 2342 - protein, 7 aa, synthetic construct
LSYLNWY

SEQ ID NO: 2343 - protein, 7 aa, synthetic construct
LTYVNWY

SEQ ID NO: 2344 - protein, 7 aa, synthetic construct
LSYVNWY

SEQ ID NO: 2345 - protein, 7 aa, synthetic construct
VSYLNWY

SEQ ID NO: 2346 - protein, 7 aa, synthetic construct
LTYVNWY

SEQ ID NO: 2347 - protein, 7 aa, synthetic construct
SSYLNWY

SEQ ID NO: 2348 - protein, 7 aa, synthetic construct
LTYLNWY

SEQ ID NO: 2349 - protein, 7 aa, synthetic construct
LTYVNWY

SEQ ID NO: 2350 - protein, 7 aa, synthetic construct
ITYVNWY

SEQ ID NO: 2351 - protein, 7 aa, synthetic construct
LTYLNWY

SEQ ID NO: 2352 - protein, 7 aa, synthetic construct
SSYVNWY

SEQ ID NO: 2353 - protein, 7 aa, synthetic construct
LSYLNWY

SEQ ID NO: 2354 - protein, 7 aa, synthetic construct
LSFVNWY

SEQ ID NO: 2355 - protein, 7 aa, synthetic construct
ITYVNWY

SEQ ID NO: 2356 - protein, 7 aa, synthetic construct
LSYLNWY

SEQ ID NO: 2357 - protein, 7 aa, synthetic construct
VTYLNWY

SEQ ID NO: 2358 - protein, 7 aa, synthetic construct
LSYVNWY

SEQ ID NO: 2359 - protein, 7 aa, synthetic construct
VSYLNWY

SEQ ID NO: 2360 - protein, 7 aa, synthetic construct
LTYVNWY

SEQ ID NO: 2361 - protein, 7 aa, synthetic construct
LSYLNWY

SEQ ID NO: 2362 - protein, 7 aa, synthetic construct
LSYLNWY

SEQ ID NO: 2363 - protein, 7 aa, synthetic construct
LTYLNWY

SEQ ID NO: 2364 - protein, 7 aa, synthetic construct
LSYLNWY

SEQ ID NO: 2365 - protein, 7 aa, synthetic construct
ISYLNWY

SEQ ID NO: 2366 - protein, 7 aa, synthetic construct
LSYVNWY

SEQ ID NO: 2367 - protein, 7 aa, synthetic construct
LTYLNWY

SEQ ID NO: 2368 - protein, 7 aa, synthetic construct
VSYVNWY

SEQ ID NO: 2369 - protein, 7 aa, synthetic construct
LTYLNWY

SEQ ID NO: 2370 - protein, 7 aa, synthetic construct
LSYLNWY

SEQ ID NO: 2371 - protein, 7 aa, synthetic construct
LSYLNWY

SEQ ID NO: 2372 - protein, 7 aa, synthetic construct
LTYVNWY

SEQ ID NO: 2373 - protein, 7 aa, synthetic construct
LSYVNWY

SEQ ID NO: 2374 - protein, 7 aa, synthetic construct
VSYLNWY

SEQ ID NO: 2375 - protein, 7 aa, synthetic construct
ITYLNWY

SEQ ID NO: 2376 - protein, 7 aa, synthetic construct
ITYLNWY

SEQ ID NO: 2377 - protein, 7 aa, synthetic construct
LTYVNWY

SEQ ID NO: 2378 - protein, 7 aa, synthetic construct
LTYLNWY

SEQ ID NO: 2379 - protein, 7 aa, synthetic construct
VTYLNWY

SEQ ID NO: 2380 - protein, 7 aa, synthetic construct
LTYLNWY

SEQ ID NO: 2381 - protein, 7 aa, synthetic construct
VTYLNWY

SEQ ID NO: 2382 - protein, 7 aa, synthetic construct
LSYLNWY

SEQ ID NO: 2383 - protein, 7 aa, synthetic construct
LSYVNWY

SEQ ID NO: 2384 - protein, 7 aa, synthetic construct
VSYVNWY

SEQ ID NO: 2385 - protein, 7 aa, synthetic construct
ISYVNWY

SEQ ID NO: 2386 - protein, 7 aa, synthetic construct
LTYVNWY

SEQ ID NO: 2387 - protein, 7 aa, synthetic construct
LSYVNWY

SEQ ID NO: 2388 - protein, 7 aa, synthetic construct
LTYLNWY

SEQ ID NO: 2389 - protein, 7 aa, synthetic construct
VSYLNWY

SEQ ID NO: 2390 - protein, 7 aa, synthetic construct
LTYVNWY

SEQ ID NO: 2391 - protein, 7 aa, synthetic construct
VSYVNWY

SEQ ID NO: 2392 - protein, 7 aa, synthetic construct
LSYLNWY

SEQ ID NO: 2393 - protein, 7 aa, synthetic construct
LSYVNWY

SEQ ID NO: 2394 - protein, 7 aa, synthetic construct
VSYVNWY

SEQ ID NO: 2395 - protein, 7 aa, synthetic construct
ITYVNWY

SEQ ID NO: 2396 - protein, 7 aa, synthetic construct
SSYLNWY

SEQ ID NO: 2397 - protein, 7 aa, synthetic construct
LSYVNWY

SEQ ID NO: 2398 - protein, 7 aa, synthetic construct
SYYLNWY

SEQ ID NO: 2399 - protein, 7 aa, synthetic construct
ITYLNWY

SEQ ID NO: 2400 - protein, 7 aa, synthetic construct
LTYLNWY

SEQ ID NO: 2401 - protein, 10 aa, synthetic construct
LVIYAVTSRA

SEQ ID NO: 2402 - protein, 10 aa, synthetic construct
LVIYAATSLA

SEQ ID NO: 2403 - protein, 10 aa, synthetic construct
LLIYAATSRH

SEQ ID NO: 2404 - protein, 10 aa, synthetic construct
LVIYAATSRA

SEQ ID NO: 2405 - protein, 10 aa, synthetic construct
LLIYATTSLA

SEQ ID NO: 2406 - protein, 10 aa, synthetic construct
LLIYAATSRA

SEQ ID NO: 2407 - protein, 10 aa, synthetic construct
LVIYATTSRH

SEQ ID NO: 2408 - protein, 10 aa, synthetic construct
LVIYAVTSRA

SEQ ID NO: 2409 - protein, 10 aa, synthetic construct
LLIYAATSLA

SEQ ID NO: 2410 - protein, 10 aa, synthetic construct
LVIYAVTSRA

SEQ ID NO: 2411 - protein, 10 aa, synthetic construct
LVIYAVTSLA

SEQ ID NO: 2412 - protein, 10 aa, synthetic construct
LLIYAATSRA

SEQ ID NO: 2413 - protein, 10 aa, synthetic construct
LVIYAATSRA

SEQ ID NO: 2414 - protein, 10 aa, synthetic construct
LVIYAATSRA

SEQ ID NO: 2415 - protein, 10 aa, synthetic construct
LLIYAATSRA

SEQ ID NO: 2416 - protein, 10 aa, synthetic construct
LLIYAATSLA

SEQ ID NO: 2417 - protein, 10 aa, synthetic construct
LLIYAATSRA

SEQ ID NO: 2418 - protein, 10 aa, synthetic construct
LVIYAATSRA

SEQ ID NO: 2419 - protein, 10 aa, synthetic construct
LVIYAATSLA

SEQ ID NO: 2420 - protein, 10 aa, synthetic construct
LLIYAATSRA

SEQ ID NO: 2421 - protein, 10 aa, synthetic construct
LVIYAATSRH

SEQ ID NO: 2422 - protein, 10 aa, synthetic construct
LLIYATTSRA

SEQ ID NO: 2423 - protein, 10 aa, synthetic construct
LLIYAVTSRH

SEQ ID NO: 2424 - protein, 10 aa, synthetic construct
LLIYAATSRA

SEQ ID NO: 2425 - protein, 10 aa, synthetic construct
LVIYAATSLH

SEQ ID NO: 2426 - protein, 10 aa, synthetic construct
LLIYAATSRA

SEQ ID NO: 2427 - protein, 10 aa, synthetic construct
LVIYAATSLA

SEQ ID NO: 2428 - protein, 10 aa, synthetic construct
LLIYAATSRA

SEQ ID NO: 2429 - protein, 10 aa, synthetic construct
LLIYAATSRA

SEQ ID NO: 2430 - protein, 10 aa, synthetic construct
LVIYAATSRH

SEQ ID NO: 2431 - protein, 10 aa, synthetic construct
LLIYAATSRH

SEQ ID NO: 2432 - protein, 10 aa, synthetic construct
LLIYAATSRA

SEQ ID NO: 2433 - protein, 10 aa, synthetic construct
LLIYAATSRA

SEQ ID NO: 2434 - protein, 10 aa, synthetic construct
LLIYATTSRA

SEQ ID NO: 2435 - protein, 10 aa, synthetic construct
LVIYAATSRH

SEQ ID NO: 2436 - protein, 10 aa, synthetic construct
LVIYATTSRH

SEQ ID NO: 2437 - protein, 10 aa, synthetic construct
LLIYAATSRA

SEQ ID NO: 2438 - protein, 10 aa, synthetic construct
LLIYAATSRA

SEQ ID NO: 2439 - protein, 10 aa, synthetic construct
LLIYAATSRA

SEQ ID NO: 2440 - protein, 10 aa, synthetic construct
LVIYAATSRA

SEQ ID NO: 2441 - protein, 10 aa, synthetic construct
LLIYATTSRA

SEQ ID NO: 2442 - protein, 10 aa, synthetic construct
LVIYAVTSRA

SEQ ID NO: 2443 - protein, 10 aa, synthetic construct
LLIYAATSRH

SEQ ID NO: 2444 - protein, 10 aa, synthetic construct
LVIYATTSRA

SEQ ID NO: 2445 - protein, 10 aa, synthetic construct
LLIYAATSRA

SEQ ID NO: 2446 - protein, 10 aa, synthetic construct
LVIYAVTSRA

SEQ ID NO: 2447 - protein, 10 aa, synthetic construct
LLIYAASSLQ

SEQ ID NO: 2448 - protein, 10 aa, synthetic construct
LLIYAATSLA

SEQ ID NO: 2449 - protein, 10 aa, synthetic construct
LLIYAATSLA

SEQ ID NO: 2450 - protein, 10 aa, synthetic construct
LVIYAATSRA

SEQ ID NO: 2451 - protein, 10 aa, synthetic construct
LVIYATTSLH

SEQ ID NO: 2452 - protein, 10 aa, synthetic construct
LVIYAATSRH

SEQ ID NO: 2453 - protein, 10 aa, synthetic construct
LVIYAATSRH

SEQ ID NO: 2454 - protein, 10 aa, synthetic construct
LVIYAATSRA

SEQ ID NO: 2455 - protein, 10 aa, synthetic construct
LLIYATTSRA

SEQ ID NO: 2456 - protein, 10 aa, synthetic construct
LLIYAATSRA

SEQ ID NO: 2457 - protein, 10 aa, synthetic construct
LLIYAASSLQ

SEQ ID NO: 2458 - protein, 10 aa, synthetic construct
LVIYATTSRA

SEQ ID NO: 2459 - protein, 10 aa, synthetic construct
LVIYAATSRH

SEQ ID NO: 2460 - protein, 10 aa, synthetic construct
LVIYAATSLA

SEQ ID NO: 2461 - protein, 10 aa, synthetic construct
LLIYAATSRA

SEQ ID NO: 2462 - protein, 10 aa, synthetic construct
LLIYAASSLQ

SEQ ID NO: 2463 - protein, 10 aa, synthetic construct
LVIYAATSLA

SEQ ID NO: 2464 - protein, 10 aa, synthetic construct
LLIYATTSLH

SEQ ID NO: 2465 - protein, 10 aa, synthetic construct
LLIYAATSRA

SEQ ID NO: 2466 - protein, 10 aa, synthetic construct
LLIYAATSRA

SEQ ID NO: 2467 - protein, 10 aa, synthetic construct
LVIYAATSRA

SEQ ID NO: 2468 - protein, 10 aa, synthetic construct
LLIYAATSRH

SEQ ID NO: 2469 - protein, 10 aa, synthetic construct
LVIYAATSRA

SEQ ID NO: 2470 - protein, 10 aa, synthetic construct
LVIYATTSRA

SEQ ID NO: 2471 - protein, 10 aa, synthetic construct
LLIYAVTSRA

SEQ ID NO: 2472 - protein, 10 aa, synthetic construct
LLIYAATSRA

SEQ ID NO: 2473 - protein, 10 aa, synthetic construct
LLIYAASSLQ

SEQ ID NO: 2474 - protein, 10 aa, synthetic construct
LLIYAATSLA

SEQ ID NO: 2475 - protein, 10 aa, synthetic construct
LVIYAATSRA

SEQ ID NO: 2476 - protein, 10 aa, synthetic construct
LVIYAATSRA

SEQ ID NO: 2477 - protein, 10 aa, synthetic construct
LVIYAVTSRH

SEQ ID NO: 2478 - protein, 10 aa, synthetic construct
LVIYAATSRA

SEQ ID NO: 2479 - protein, 10 aa, synthetic construct
LVIYAATSRA

SEQ ID NO: 2480 - protein, 10 aa, synthetic construct
LLIYAVTSRH

SEQ ID NO: 2481 - protein, 10 aa, synthetic construct
LLIYAATSRA

SEQ ID NO: 2482 - protein, 10 aa, synthetic construct
LLIYAATSRH

SEQ ID NO: 2483 - protein, 10 aa, synthetic construct
LVIYGATSRA

SEQ ID NO: 2484 - protein, 10 aa, synthetic construct
LLIYAVTSRA

SEQ ID NO: 2485 - protein, 10 aa, synthetic construct
LVIYAATSRH

SEQ ID NO: 2486 - protein, 10 aa, synthetic construct
LVIYAATSRA

SEQ ID NO: 2487 - protein, 10 aa, synthetic construct
LVIYAATSRA

SEQ ID NO: 2488 - protein, 10 aa, synthetic construct
LVIYAVTSRA

SEQ ID NO: 2489 - protein, 10 aa, synthetic construct
LLIYAATSRA

SEQ ID NO: 2490 - protein, 10 aa, synthetic construct
LLIYAATSRA

SEQ ID NO: 2491 - protein, 10 aa, synthetic construct
LLIYAVTSRH

SEQ ID NO: 2492 - protein, 10 aa, synthetic construct
LLIYAVTSRA

SEQ ID NO: 2493 - protein, 10 aa, synthetic construct
LVIYAATSRA

SEQ ID NO: 2494 - protein, 10 aa, synthetic construct
LVIYAATSRA

SEQ ID NO: 2495 - protein, 10 aa, synthetic construct
LLIYTTTSLH

SEQ ID NO: 2496 - protein, 10 aa, synthetic construct
LLIYAATSRA

SEQ ID NO: 2497 - protein, 10 aa, synthetic construct
LVIYAVTSRA

SEQ ID NO: 2498 - protein, 10 aa, synthetic construct
LVIYAATSRA

SEQ ID NO: 2499 - protein, 10 aa, synthetic construct
LLIYAATSLA

SEQ ID NO: 2500 - protein, 10 aa, synthetic construct
LLIYATTSRH

SEQ ID NO: 2501 - protein, 10 aa, synthetic construct
LLIYAATSLA

SEQ ID NO: 2502 - protein, 10 aa, synthetic construct
LLIYAATSRA

SEQ ID NO: 2503 - protein, 10 aa, synthetic construct
LLIYAATSRA

SEQ ID NO: 2504 - protein, 10 aa, synthetic construct
LVIYAATSRA

SEQ ID NO: 2505 - protein, 10 aa, synthetic construct
LLIYAATSLA

SEQ ID NO: 2506 - protein, 10 aa, synthetic construct
LVIYAATSRA

SEQ ID NO: 2507 - protein, 10 aa, synthetic construct
LLIYAVTSRA

SEQ ID NO: 2508 - protein, 10 aa, synthetic construct
LLIYAATSRA

SEQ ID NO: 2509 - protein, 10 aa, synthetic construct
LLIYAATSRA

SEQ ID NO: 2510 - protein, 10 aa, synthetic construct
LLIYATTSRH

SEQ ID NO: 2511 - protein, 10 aa, synthetic construct
LVIYAATSRA

SEQ ID NO: 2512 - protein, 10 aa, synthetic construct
LLIYAATSLA

SEQ ID NO: 2513 - protein, 10 aa, synthetic construct
LVIYAATSRH

SEQ ID NO: 2514 - protein, 10 aa, synthetic construct
LLIYAATSRA

SEQ ID NO: 2515 - protein, 10 aa, synthetic construct
LLIYAATSRA

SEQ ID NO: 2516 - protein, 10 aa, synthetic construct
LLIYAVTSLA

SEQ ID NO: 2517 - protein, 10 aa, synthetic construct
LVIYAATSRA

SEQ ID NO: 2518 - protein, 10 aa, synthetic construct
LLIYAATSRA

SEQ ID NO: 2519 - protein, 10 aa, synthetic construct
LLIYAATSRA

SEQ ID NO: 2520 - protein, 10 aa, synthetic construct
LLIYAATSLA

SEQ ID NO: 2521 - protein, 10 aa, synthetic construct
LVIYAATSLA

SEQ ID NO: 2522 - protein, 10 aa, synthetic construct
LLIYYVTNRQ

SEQ ID NO: 2523 - protein, 10 aa, synthetic construct
LVIYAATSRA

SEQ ID NO: 2524 - protein, 10 aa, synthetic construct
LLIYAVTSRA

SEQ ID NO: 2525 - protein, 10 aa, synthetic construct
LVIYAATSLA

SEQ ID NO: 2526 - protein, 10 aa, synthetic construct
LVIYAATSRA

SEQ ID NO: 2527 - protein, 10 aa, synthetic construct
LLIYAATSRA

SEQ ID NO: 2528 - protein, 10 aa, synthetic construct
LVIYYASNRA

SEQ ID NO: 2529 - protein, 10 aa, synthetic construct
LVIYATTSLA

SEQ ID NO: 2530 - protein, 10 aa, synthetic construct
LVIYAATSRA

SEQ ID NO: 2531 - protein, 10 aa, synthetic construct
LVIYAATSRA

SEQ ID NO: 2532 - protein, 10 aa, synthetic construct
LLIYAATSRA

SEQ ID NO: 2533 - protein, 10 aa, synthetic construct
LVIYAATSRA

SEQ ID NO: 2534 - protein, 10 aa, synthetic construct
LLIYAATSRH

SEQ ID NO: 2535 - protein, 10 aa, synthetic construct
LVIYATTSRA

SEQ ID NO: 2536 - protein, 10 aa, synthetic construct
LVIYAATSRA

SEQ ID NO: 2537 - protein, 10 aa, synthetic construct
LVIYAATSRA

SEQ ID NO: 2538 - protein, 10 aa, synthetic construct
LLIYVVNNRA

SEQ ID NO: 2539 - protein, 10 aa, synthetic construct
LVIYAATSRA

SEQ ID NO: 2540 - protein, 10 aa, synthetic construct
LLIYAVTSRA

SEQ ID NO: 2541 - protein, 10 aa, synthetic construct
LLIYAATSRA

SEQ ID NO: 2542 - protein, 10 aa, synthetic construct
LVIYATTSRA

SEQ ID NO: 2543 - protein, 10 aa, synthetic construct
LVIYAATSRH

SEQ ID NO: 2544 - protein, 10 aa, synthetic construct
LVIYATTSRA

SEQ ID NO: 2545 - protein, 10 aa, synthetic construct
LVIYAATSRA

SEQ ID NO: 2546 - protein, 10 aa, synthetic construct
LVIYAATSLA

SEQ ID NO: 2547 - protein, 10 aa, synthetic construct
LVIYAATSRH

SEQ ID NO: 2548 - protein, 10 aa, synthetic construct
LLIYAATSRA

SEQ ID NO: 2549 - protein, 10 aa, synthetic construct
LVIYATTSRA

SEQ ID NO: 2550 - protein, 10 aa, synthetic construct
LLIYAATSRA

SEQ ID NO: 2551 - protein, 10 aa, synthetic construct
LVIYAATSRA

SEQ ID NO: 2552 - protein, 10 aa, synthetic construct
LVIYAATSLA

SEQ ID NO: 2553 - protein, 10 aa, synthetic construct
LLIYAATSRH

SEQ ID NO: 2554 - protein, 10 aa, synthetic construct
LVIYAATSRH

SEQ ID NO: 2555 - protein, 10 aa, synthetic construct
LVIYAATSRH

SEQ ID NO: 2556 - protein, 10 aa, synthetic construct
LLIYAVTSRA

SEQ ID NO: 2557 - protein, 10 aa, synthetic construct
LLIYAATSRH

SEQ ID NO: 2558 - protein, 10 aa, synthetic construct
LVIYAATSLA

SEQ ID NO: 2559 - protein, 10 aa, synthetic construct
LVIYAATSRA

SEQ ID NO: 2560 - protein, 10 aa, synthetic construct
LVIYAATSLA

SEQ ID NO: 2561 - protein, 10 aa, synthetic construct
LVIYAATSRH

SEQ ID NO: 2562 - protein, 10 aa, synthetic construct
LVIYAATSRA

SEQ ID NO: 2563 - protein, 10 aa, synthetic construct
LVIYAATSRA

SEQ ID NO: 2564 - protein, 10 aa, synthetic construct
LLIYAATSLA

SEQ ID NO: 2565 - protein, 10 aa, synthetic construct
LVIYAATSRA

SEQ ID NO: 2566 - protein, 10 aa, synthetic construct
LVIYAATSLA

SEQ ID NO: 2567 - protein, 10 aa, synthetic construct
LVIYATTSLA

SEQ ID NO: 2568 - protein, 10 aa, synthetic construct
LLIYAATSLA

SEQ ID NO: 2569 - protein, 10 aa, synthetic construct
LVIYAATSRA

SEQ ID NO: 2570 - protein, 10 aa, synthetic construct
LLIYAATSRA

SEQ ID NO: 2571 - protein, 10 aa, synthetic construct
LVIYAATSRH

SEQ ID NO: 2572 - protein, 10 aa, synthetic construct
LLIYAATSRA

SEQ ID NO: 2573 - protein, 10 aa, synthetic construct
LLIYAATSRA

SEQ ID NO: 2574 - protein, 10 aa, synthetic construct
LLIYAATSRA

SEQ ID NO: 2575 - protein, 10 aa, synthetic construct
LVIYAVTSRA

SEQ ID NO: 2576 - protein, 10 aa, synthetic construct
LVIYAATSRA

SEQ ID NO: 2577 - protein, 10 aa, synthetic construct
LLIYAASSLQ

SEQ ID NO: 2578 - protein, 10 aa, synthetic construct
LVIYAVTSRA

SEQ ID NO: 2579 - protein, 10 aa, synthetic construct
LVIYAATSRA

SEQ ID NO: 2580 - protein, 10 aa, synthetic construct
LLIYAATSRH

SEQ ID NO: 2581 - protein, 10 aa, synthetic construct
LVIYAATSRA

SEQ ID NO: 2582 - protein, 10 aa, synthetic construct
LLIYAATSRA

SEQ ID NO: 2583 - protein, 10 aa, synthetic construct
LLIYAATSRA

SEQ ID NO: 2584 - protein, 10 aa, synthetic construct
LLIYAATSRH

SEQ ID NO: 2585 - protein, 10 aa, synthetic construct
LLIYAVTSRA

SEQ ID NO: 2586 - protein, 10 aa, synthetic construct
LLIYAATSLA

SEQ ID NO: 2587 - protein, 10 aa, synthetic construct
LVIYAATSRA

SEQ ID NO: 2588 - protein, 10 aa, synthetic construct
LLIYAATSRA

SEQ ID NO: 2589 - protein, 10 aa, synthetic construct
LLIYATTSLA

SEQ ID NO: 2590 - protein, 10 aa, synthetic construct
LVIYAATSRA

SEQ ID NO: 2591 - protein, 10 aa, synthetic construct
LVIYAATSRA

SEQ ID NO: 2592 - protein, 10 aa, synthetic construct
LLIYAVTSRA

SEQ ID NO: 2593 - protein, 10 aa, synthetic construct
LLIYAVTSRA

SEQ ID NO: 2594 - protein, 10 aa, synthetic construct
LLIYAATSRA

SEQ ID NO: 2595 - protein, 10 aa, synthetic construct
LVIYAATSRA

SEQ ID NO: 2596 - protein, 10 aa, synthetic construct
LLIYAATSRA

SEQ ID NO: 2597 - protein, 10 aa, synthetic construct
LLIYAATSRA

SEQ ID NO: 2598 - protein, 10 aa, synthetic construct
LLIYAATSLA

SEQ ID NO: 2599 - protein, 10 aa, synthetic construct
LLIYAATSRH

SEQ ID NO: 2600 - protein, 10 aa, synthetic construct
LLIYAATSRA

SEQ ID NO: 2601 - protein, 10 aa, synthetic construct
LLIYAATSLA

SEQ ID NO: 2602 - protein, 10 aa, synthetic construct
LVIYAATSRA

SEQ ID NO: 2603 - protein, 10 aa, synthetic construct
LVIYAATSRA

SEQ ID NO: 2604 - protein, 10 aa, synthetic construct
LLIYAATSRH

SEQ ID NO: 2605 - protein, 10 aa, synthetic construct
LVIYAATSRA

SEQ ID NO: 2606 - protein, 10 aa, synthetic construct
LVIYAATSRH

SEQ ID NO: 2607 - protein, 10 aa, synthetic construct
LLIYAASSLQ

SEQ ID NO: 2608 - protein, 10 aa, synthetic construct
LLIYAATSRA

SEQ ID NO: 2609 - protein, 10 aa, synthetic construct
LVIYAATSRA

SEQ ID NO: 2610 - protein, 10 aa, synthetic construct
LLIYAVTSLA

SEQ ID NO: 2611 - protein, 10 aa, synthetic construct
LVIYAATSLA

SEQ ID NO: 2612 - protein, 10 aa, synthetic construct
LLIYAVTSRA

SEQ ID NO: 2613 - protein, 10 aa, synthetic construct
LLIYAATSRA

SEQ ID NO: 2614 - protein, 10 aa, synthetic construct
LVIYAATSRA

SEQ ID NO: 2615 - protein, 10 aa, synthetic construct
LLIYAATSRA

SEQ ID NO: 2616 - protein, 10 aa, synthetic construct
LVIYAATSRA

SEQ ID NO: 2617 - protein, 10 aa, synthetic construct
LLIYAATSRA

SEQ ID NO: 2618 - protein, 10 aa, synthetic construct
LVIYAVTSLA

SEQ ID NO: 2619 - protein, 10 aa, synthetic construct
LLIYAATSRA

SEQ ID NO: 2620 - protein, 10 aa, synthetic construct
LVIYATTSRA

SEQ ID NO: 2621 - protein, 10 aa, synthetic construct
LVIYAATSRA

SEQ ID NO: 2622 - protein, 10 aa, synthetic construct
LLIYAATSLH

SEQ ID NO: 2623 - protein, 10 aa, synthetic construct
LLIYAATSRA

SEQ ID NO: 2624 - protein, 10 aa, synthetic construct
LLIYAATSRA

SEQ ID NO: 2625 - protein, 10 aa, synthetic construct
LVIYAATSRA

SEQ ID NO: 2626 - protein, 10 aa, synthetic construct
LVIYAATSRA

SEQ ID NO: 2627 - protein, 10 aa, synthetic construct
LLIYVVTNRE

SEQ ID NO: 2628 - protein, 10 aa, synthetic construct
LLIYYVTNRQ

SEQ ID NO: 2629 - protein, 10 aa, synthetic construct
LVIYAATSRA

SEQ ID NO: 2630 - protein, 10 aa, synthetic construct
LLIYAATSRA

SEQ ID NO: 2631 - protein, 10 aa, synthetic construct
LVIYAATSRA

SEQ ID NO: 2632 - protein, 10 aa, synthetic construct
LVIYAATSRA

SEQ ID NO: 2633 - protein, 10 aa, synthetic construct
LLIYAATSRA

SEQ ID NO: 2634 - protein, 10 aa, synthetic construct
LVIYAATSRA

SEQ ID NO: 2635 - protein, 10 aa, synthetic construct
LVIYAATSRA

SEQ ID NO: 2636 - protein, 10 aa, synthetic construct
LLIYAATSLA

SEQ ID NO: 2637 - protein, 10 aa, synthetic construct
LVIYAVTSRA

SEQ ID NO: 2638 - protein, 10 aa, synthetic construct
LLIYAATSRA

SEQ ID NO: 2639 - protein, 10 aa, synthetic construct
LLIYAATSLA

SEQ ID NO: 2640 - protein, 10 aa, synthetic construct
LVIYAATSRA

SEQ ID NO: 2641 - protein, 10 aa, synthetic construct
LVIYAATSLA

SEQ ID NO: 2642 - protein, 10 aa, synthetic construct
LVIYAATSRA

SEQ ID NO: 2643 - protein, 10 aa, synthetic construct
LVIYATTSLA

SEQ ID NO: 2644 - protein, 10 aa, synthetic construct
LLIYAASSLQ

SEQ ID NO: 2645 - protein, 10 aa, synthetic construct
LVIYAATSRA

SEQ ID NO: 2646 - protein, 10 aa, synthetic construct
LLIYAVTSRA

SEQ ID NO: 2647 - protein, 10 aa, synthetic construct
LVIYYVSNLP

SEQ ID NO: 2648 - protein, 10 aa, synthetic construct
LVIYAATSRH

SEQ ID NO: 2649 - protein, 8 aa, synthetic construct
QQSYDSPL

SEQ ID NO: 2650 - protein, 8 aa, synthetic construct
QQSYESPL

SEQ ID NO: 2651 - protein, 8 aa, synthetic construct
QQSYENPL

SEQ ID NO: 2652 - protein, 8 aa, synthetic construct
QQSYESPL

SEQ ID NO: 2653 - protein, 8 aa, synthetic construct
QQSYDLPL

SEQ ID NO: 2654 - protein, 8 aa, synthetic construct
QQSYENPL

SEQ ID NO: 2655 - protein, 8 aa, synthetic construct
QQSYDSPL

SEQ ID NO: 2656 - protein, 8 aa, synthetic construct
QQSYESPL

SEQ ID NO: 2657 - protein, 8 aa, synthetic construct
QQSYESPL

SEQ ID NO: 2658 - protein, 8 aa, synthetic construct
QQSYSLPL

SEQ ID NO: 2659 - protein, 8 aa, synthetic construct
QQSYDTPL

SEQ ID NO: 2660 - protein, 8 aa, synthetic construct
QQSDESPL

SEQ ID NO: 2661 - protein, 8 aa, synthetic construct
QQSYSSPL

SEQ ID NO: 2662 - protein, 8 aa, synthetic construct
QQSYDTPL

SEQ ID NO: 2663 - protein, 8 aa, synthetic construct
QQSYDSPL

SEQ ID NO: 2664 - protein, 8 aa, synthetic construct
QQSYDNPL

SEQ ID NO: 2665 - protein, 8 aa, synthetic construct
QQSYDNPL

SEQ ID NO: 2666 - protein, 8 aa, synthetic construct
QQSDDSPL

SEQ ID NO: 2667 - protein, 8 aa, synthetic construct
QQSYELPL

SEQ ID NO: 2668 - protein, 8 aa, synthetic construct
QQSDNLPL

SEQ ID NO: 2669 - protein, 8 aa, synthetic construct
QQSYETPL

SEQ ID NO: 2670 - protein, 8 aa, synthetic construct
QQSYDSPL

SEQ ID NO: 2671 - protein, 8 aa, synthetic construct
QQSYNSPL

SEQ ID NO: 2672 - protein, 8 aa, synthetic construct
QQSYENPL

SEQ ID NO: 2673 - protein, 8 aa, synthetic construct
QQSYNNPL

SEQ ID NO: 2674 - protein, 8 aa, synthetic construct
QQSYSTPL

SEQ ID NO: 2675 - protein, 8 aa, synthetic construct
QQSYNTPL

SEQ ID NO: 2676 - protein, 8 aa, synthetic construct
QQSYDSPL

SEQ ID NO: 2677 - protein, 8 aa, synthetic construct
QQSYSTPL

SEQ ID NO: 2678 - protein, 8 aa, synthetic construct
QQSYESPL

SEQ ID NO: 2679 - protein, 8 aa, synthetic construct
QQSYDNPL

SEQ ID NO: 2680 - protein, 8 aa, synthetic construct
QQSYDNPL

SEQ ID NO: 2681 - protein, 8 aa, synthetic construct
QQSYDNPL

SEQ ID NO: 2682 - protein, 8 aa, synthetic construct
QQSYETPL

SEQ ID NO: 2683 - protein, 8 aa, synthetic construct
QQSYSLPL

SEQ ID NO: 2684 - protein, 8 aa, synthetic construct
QQSYESPL

SEQ ID NO: 2685 - protein, 8 aa, synthetic construct
QQSDNTPL

SEQ ID NO: 2686 - protein, 8 aa, synthetic construct
QQSYETPL

SEQ ID NO: 2687 - protein, 8 aa, synthetic construct
QQSDDTPL

SEQ ID NO: 2688 - protein, 8 aa, synthetic construct
QQSYENPL

SEQ ID NO: 2689 - protein, 8 aa, synthetic construct
QQSYDTPL

SEQ ID NO: 2690 - protein, 8 aa, synthetic construct
QQSYENPL

SEQ ID NO: 2691 - protein, 8 aa, synthetic construct
QQSYNNPL

SEQ ID NO: 2692 - protein, 8 aa, synthetic construct
QQSYSSPL

SEQ ID NO: 2693 - protein, 8 aa, synthetic construct
QQSDDSPL

SEQ ID NO: 2694 - protein, 8 aa, synthetic construct
QQSYDSPL

SEQ ID NO: 2695 - protein, 8 aa, synthetic construct
QQSYSTPL

SEQ ID NO: 2696 - protein, 8 aa, synthetic construct
QQSYNLPL

SEQ ID NO: 2697 - protein, 8 aa, synthetic construct
QQSYNLPL

SEQ ID NO: 2698 - protein, 8 aa, synthetic construct
QQSYDNPL

SEQ ID NO: 2699 - protein, 8 aa, synthetic construct
QQSYDTPL

SEQ ID NO: 2700 - protein, 8 aa, synthetic construct
QQSYDLPL

SEQ ID NO: 2701 - protein, 8 aa, synthetic construct
QQSYNTPL

SEQ ID NO: 2702 - protein, 8 aa, synthetic construct
QQSYDTPL

SEQ ID NO: 2703 - protein, 8 aa, synthetic construct
QQSYDLPL

SEQ ID NO: 2704 - protein, 8 aa, synthetic construct
QQSYESPL

SEQ ID NO: 2705 - protein, 8 aa, synthetic construct
QQSYSTPL

SEQ ID NO: 2706 - protein, 8 aa, synthetic construct
QQSYETPL

SEQ ID NO: 2707 - protein, 8 aa, synthetic construct
QQSYDTPL

SEQ ID NO: 2708 - protein, 8 aa, synthetic construct
QQSDDTPL

SEQ ID NO: 2709 - protein, 8 aa, synthetic construct
QQSYETPL

SEQ ID NO: 2710 - protein, 8 aa, synthetic construct
QQSYSTPL

SEQ ID NO: 2711 - protein, 8 aa, synthetic construct
QQSYDTPL

SEQ ID NO: 2712 - protein, 8 aa, synthetic construct
QQSYDTPL

SEQ ID NO: 2713 - protein, 8 aa, synthetic construct
QQSYDSPL

SEQ ID NO: 2714 - protein, 8 aa, synthetic construct
QQSYDTPL

SEQ ID NO: 2715 - protein, 8 aa, synthetic construct
QQSYNSPL

SEQ ID NO: 2716 - protein, 8 aa, synthetic construct
QQSYDNPL

SEQ ID NO: 2717 - protein, 8 aa, synthetic construct
QQSYDSPL

SEQ ID NO: 2718 - protein, 8 aa, synthetic construct
QQSNELPL

SEQ ID NO: 2719 - protein, 8 aa, synthetic construct
QQSYDSPL

SEQ ID NO: 2720 - protein, 8 aa, synthetic construct
QQSYETPL

SEQ ID NO: 2721 - protein, 8 aa, synthetic construct
QQSYSTPL

SEQ ID NO: 2722 - protein, 8 aa, synthetic construct
QQSYSSPL

SEQ ID NO: 2723 - protein, 8 aa, synthetic construct
QQSDSNPL

SEQ ID NO: 2724 - protein, 8 aa, synthetic construct
QQSDSTPL

SEQ ID NO: 2725 - protein, 8 aa, synthetic construct
QQSYDSPL

SEQ ID NO: 2726 - protein, 8 aa, synthetic construct
QQSDDSPL

SEQ ID NO: 2727 - protein, 8 aa, synthetic construct
QQSYDLPL

SEQ ID NO: 2728 - protein, 8 aa, synthetic construct
QQSYSLPL

SEQ ID NO: 2729 - protein, 8 aa, synthetic construct
QQSYSSPL

SEQ ID NO: 2730 - protein, 8 aa, synthetic construct
QQSYDNPL

SEQ ID NO: 2731 - protein, 8 aa, synthetic construct
QQSYDSPL

SEQ ID NO: 2732 - protein, 8 aa, synthetic construct
QQSYENPL

SEQ ID NO: 2733 - protein, 8 aa, synthetic construct
QQSYDSPL

SEQ ID NO: 2734 - protein, 8 aa, synthetic construct
QQSYNNPL

SEQ ID NO: 2735 - protein, 8 aa, synthetic construct
QQSYNLPL

SEQ ID NO: 2736 - protein, 8 aa, synthetic construct
QQSYETPL

SEQ ID NO: 2737 - protein, 8 aa, synthetic construct
QQSYDSPL

SEQ ID NO: 2738 - protein, 8 aa, synthetic construct
QQSYDLPL

SEQ ID NO: 2739 - protein, 8 aa, synthetic construct
QQGYDLPL

SEQ ID NO: 2740 - protein, 8 aa, synthetic construct
QQSYENPL

SEQ ID NO: 2741 - protein, 8 aa, synthetic construct
QQSYELPL

SEQ ID NO: 2742 - protein, 8 aa, synthetic construct
QQSYDSPL

SEQ ID NO: 2743 - protein, 8 aa, synthetic construct
QQSYNNPL

SEQ ID NO: 2744 - protein, 8 aa, synthetic construct
QQSYSNPL

SEQ ID NO: 2745 - protein, 8 aa, synthetic construct
QQSYDTPL

SEQ ID NO: 2746 - protein, 8 aa, synthetic construct
QQSYNLPL

SEQ ID NO: 2747 - protein, 8 aa, synthetic construct
QQSYDTPL

SEQ ID NO: 2748 - protein, 8 aa, synthetic construct
QQSYDNPL

SEQ ID NO: 2749 - protein, 8 aa, synthetic construct
QQSYDTPL

SEQ ID NO: 2750 - protein, 8 aa, synthetic construct
QQSYESPL

SEQ ID NO: 2751 - protein, 8 aa, synthetic construct
QQSYELPL

SEQ ID NO: 2752 - protein, 8 aa, synthetic construct
QQSYDTPL

SEQ ID NO: 2753 - protein, 8 aa, synthetic construct
QQSYDSPL

SEQ ID NO: 2754 - protein, 8 aa, synthetic construct
QQSYDSPL

SEQ ID NO: 2755 - protein, 8 aa, synthetic construct
QQSYDLPL

SEQ ID NO: 2756 - protein, 8 aa, synthetic construct
QQSYDLPL

SEQ ID NO: 2757 - protein, 8 aa, synthetic construct
QQSYSSPL

SEQ ID NO: 2758 - protein, 8 aa, synthetic construct
QQSYETPL

SEQ ID NO: 2759 - protein, 8 aa, synthetic construct
QQSYENPL

SEQ ID NO: 2760 - protein, 8 aa, synthetic construct
QQSYESPL

SEQ ID NO: 2761 - protein, 8 aa, synthetic construct
QQSDNTPL

SEQ ID NO: 2762 - protein, 8 aa, synthetic construct
QQSYSNPL

SEQ ID NO: 2763 - protein, 8 aa, synthetic construct
QQSYDTPL

SEQ ID NO: 2764 - protein, 8 aa, synthetic construct
QQSYESPL

SEQ ID NO: 2765 - protein, 8 aa, synthetic construct
QQSYNLPL

SEQ ID NO: 2766 - protein, 8 aa, synthetic construct
QQSYDSPL

SEQ ID NO: 2767 - protein, 8 aa, synthetic construct
QQSYDNPL

SEQ ID NO: 2768 - protein, 8 aa, synthetic construct
QQSYDSPL

SEQ ID NO: 2769 - protein, 8 aa, synthetic construct
QQSYDTPL

SEQ ID NO: 2770 - protein, 8 aa, synthetic construct
QQSYSSPL

SEQ ID NO: 2771 - protein, 8 aa, synthetic construct
QQSYNSPL

SEQ ID NO: 2772 - protein, 8 aa, synthetic construct
QQSYDSPL

SEQ ID NO: 2773 - protein, 8 aa, synthetic construct
QQSYSTPL

SEQ ID NO: 2774 - protein, 8 aa, synthetic construct
QQSYDNPL

SEQ ID NO: 2775 - protein, 8 aa, synthetic construct
QQSYDTPL

SEQ ID NO: 2776 - protein, 8 aa, synthetic construct
QQSYDSPL

SEQ ID NO: 2777 - protein, 8 aa, synthetic construct
QQSYDTPL

SEQ ID NO: 2778 - protein, 8 aa, synthetic construct
QQSYELPL

SEQ ID NO: 2779 - protein, 8 aa, synthetic construct
QQSYETPL

SEQ ID NO: 2780 - protein, 8 aa, synthetic construct
QQSYNLPL

SEQ ID NO: 2781 - protein, 8 aa, synthetic construct
QQSYNSPL

SEQ ID NO: 2782 - protein, 8 aa, synthetic construct
QQSYDSPL

SEQ ID NO: 2783 - protein, 8 aa, synthetic construct
QQSYNNPL

SEQ ID NO: 2784 - protein, 8 aa, synthetic construct
QQSDNTPL

SEQ ID NO: 2785 - protein, 8 aa, synthetic construct
QQSYESPL

SEQ ID NO: 2786 - protein, 8 aa, synthetic construct
QQSYENPL

SEQ ID NO: 2787 - protein, 8 aa, synthetic construct
QQSYSLPL

SEQ ID NO: 2788 - protein, 8 aa, synthetic construct
QQSYDTPL

SEQ ID NO: 2789 - protein, 8 aa, synthetic construct
QQSYDNPL

SEQ ID NO: 2790 - protein, 8 aa, synthetic construct
QQSYESPL

SEQ ID NO: 2791 - protein, 8 aa, synthetic construct
QQSYDSPL

SEQ ID NO: 2792 - protein, 8 aa, synthetic construct
QQSYDLPL

SEQ ID NO: 2793 - protein, 8 aa, synthetic construct
QQSYELPL

SEQ ID NO: 2794 - protein, 8 aa, synthetic construct
QQSYDTPL

SEQ ID NO: 2795 - protein, 8 aa, synthetic construct
QQSYNLPL

SEQ ID NO: 2796 - protein, 8 aa, synthetic construct
QQSYELPL

SEQ ID NO: 2797 - protein, 8 aa, synthetic construct
QQSYSTPL

SEQ ID NO: 2798 - protein, 8 aa, synthetic construct
QQSYSTPL

SEQ ID NO: 2799 - protein, 8 aa, synthetic construct
QQSYNNPL

SEQ ID NO: 2800 - protein, 8 aa, synthetic construct
QQSYNNPL

SEQ ID NO: 2801 - protein, 8 aa, synthetic construct
QQSYNNPL

SEQ ID NO: 2802 - protein, 8 aa, synthetic construct
QQSYNSPL

SEQ ID NO: 2803 - protein, 8 aa, synthetic construct
QQSYESPL

SEQ ID NO: 2804 - protein, 8 aa, synthetic construct
QQSYSSPL

SEQ ID NO: 2805 - protein, 8 aa, synthetic construct
QQSDDSPL

SEQ ID NO: 2806 - protein, 8 aa, synthetic construct
QQSYDSPL

SEQ ID NO: 2807 - protein, 8 aa, synthetic construct
QQSYETPL

SEQ ID NO: 2808 - protein, 8 aa, synthetic construct
QQSYDSPL

SEQ ID NO: 2809 - protein, 8 aa, synthetic construct
QQSDNTPL

SEQ ID NO: 2810 - protein, 8 aa, synthetic construct
QQSYDNPL

SEQ ID NO: 2811 - protein, 8 aa, synthetic construct
QQSYDTPL

SEQ ID NO: 2812 - protein, 8 aa, synthetic construct
QQSYETPL

SEQ ID NO: 2813 - protein, 8 aa, synthetic construct
QQSYDTPL

SEQ ID NO: 2814 - protein, 8 aa, synthetic construct
QQSYSSPL

SEQ ID NO: 2815 - protein, 8 aa, synthetic construct
QQSYNTPL

SEQ ID NO: 2816 - protein, 8 aa, synthetic construct
QQSYSLPL

SEQ ID NO: 2817 - protein, 8 aa, synthetic construct
QQSYDLPL

SEQ ID NO: 2818 - protein, 8 aa, synthetic construct
QQSYETPL

SEQ ID NO: 2819 - protein, 8 aa, synthetic construct
QQSYESPL

SEQ ID NO: 2820 - protein, 8 aa, synthetic construct
QQSYDLPL

SEQ ID NO: 2821 - protein, 8 aa, synthetic construct
QQSYDSPL

SEQ ID NO: 2822 - protein, 8 aa, synthetic construct
QQSYNTPL

SEQ ID NO: 2823 - protein, 8 aa, synthetic construct
QQSYNSPL

SEQ ID NO: 2824 - protein, 8 aa, synthetic construct
QQSYDTPL

SEQ ID NO: 2825 - protein, 8 aa, synthetic construct
QQSYNNPL

SEQ ID NO: 2826 - protein, 8 aa, synthetic construct
QQSYETPL

SEQ ID NO: 2827 - protein, 8 aa, synthetic construct
QQSYDSPL

SEQ ID NO: 2828 - protein, 8 aa, synthetic construct
QQSYDSPL

SEQ ID NO: 2829 - protein, 8 aa, synthetic construct
QQSYDSPL

SEQ ID NO: 2830 - protein, 8 aa, synthetic construct
QQSYDSPL

SEQ ID NO: 2831 - protein, 8 aa, synthetic construct
QQSYDLPL

SEQ ID NO: 2832 - protein, 8 aa, synthetic construct
QQSYNNPL

SEQ ID NO: 2833 - protein, 8 aa, synthetic construct
QQSYDLPL

SEQ ID NO: 2834 - protein, 8 aa, synthetic construct
QQSYETPL

SEQ ID NO: 2835 - protein, 8 aa, synthetic construct
QQSYDTPL

SEQ ID NO: 2836 - protein, 8 aa, synthetic construct
QQSYDLPL

SEQ ID NO: 2837 - protein, 8 aa, synthetic construct
QQSYNSPL

SEQ ID NO: 2838 - protein, 8 aa, synthetic construct
QQSYDNPL

SEQ ID NO: 2839 - protein, 8 aa, synthetic construct
QQSYETPL

SEQ ID NO: 2840 - protein, 8 aa, synthetic construct
QQSYDLPL

SEQ ID NO: 2841 - protein, 8 aa, synthetic construct
QQSYESPL

SEQ ID NO: 2842 - protein, 8 aa, synthetic construct
QQSYDTPL

SEQ ID NO: 2843 - protein, 8 aa, synthetic construct
QQSYDNPL

SEQ ID NO: 2844 - protein, 8 aa, synthetic construct
QQSYDSPL

SEQ ID NO: 2845 - protein, 8 aa, synthetic construct
QQSYNSPL

SEQ ID NO: 2846 - protein, 8 aa, synthetic construct
QQSYSSPL

SEQ ID NO: 2847 - protein, 8 aa, synthetic construct
QQSYESPL

SEQ ID NO: 2848 - protein, 8 aa, synthetic construct
QQSYSTPL

SEQ ID NO: 2849 - protein, 8 aa, synthetic construct
QQSYDLPL

SEQ ID NO: 2850 - protein, 8 aa, synthetic construct
QQSYNLPL

SEQ ID NO: 2851 - protein, 8 aa, synthetic construct
QQSYNTPL

SEQ ID NO: 2852 - protein, 8 aa, synthetic construct
QQSYDLPL

SEQ ID NO: 2853 - protein, 8 aa, synthetic construct
QQSYDSPL

SEQ ID NO: 2854 - protein, 8 aa, synthetic construct
QQSYENPL

SEQ ID NO: 2855 - protein, 8 aa, synthetic construct
QQSYELPL

SEQ ID NO: 2856 - protein, 8 aa, synthetic construct
QQSYNSPL

SEQ ID NO: 2857 - protein, 8 aa, synthetic construct
QQSYDNPL

SEQ ID NO: 2858 - protein, 8 aa, synthetic construct
QQSYESPL

SEQ ID NO: 2859 - protein, 8 aa, synthetic construct
QQSYDNPL

SEQ ID NO: 2860 - protein, 8 aa, synthetic construct
QQSYDLPL

SEQ ID NO: 2861 - protein, 8 aa, synthetic construct
QQSYDSPL

SEQ ID NO: 2862 - protein, 8 aa, synthetic construct
QQSYDSPL

SEQ ID NO: 2863 - protein, 8 aa, synthetic construct
QQSYDNPL

SEQ ID NO: 2864 - protein, 8 aa, synthetic construct
QQSYNLPL

SEQ ID NO: 2865 - protein, 8 aa, synthetic construct
QQSYETPL

SEQ ID NO: 2866 - protein, 8 aa, synthetic construct
QQSYDLPL

SEQ ID NO: 2867 - protein, 8 aa, synthetic construct
QQSYDLPL

SEQ ID NO: 2868 - protein, 8 aa, synthetic construct
QQSYDSPL

SEQ ID NO: 2869 - protein, 8 aa, synthetic construct
QQSYELPL

SEQ ID NO: 2870 - protein, 8 aa, synthetic construct
QQSYDTPL

SEQ ID NO: 2871 - protein, 8 aa, synthetic construct
QQSYDTPL

SEQ ID NO: 2872 - protein, 8 aa, synthetic construct
QQSYSTPL

SEQ ID NO: 2873 - protein, 8 aa, synthetic construct
QQSYETPL

SEQ ID NO: 2874 - protein, 8 aa, synthetic construct
QQSDDSPL

SEQ ID NO: 2875 - protein, 8 aa, synthetic construct
QQSYETPL

SEQ ID NO: 2876 - protein, 8 aa, synthetic construct
QQSYSIPL

SEQ ID NO: 2877 - protein, 8 aa, synthetic construct
QQSYDSPL

SEQ ID NO: 2878 - protein, 8 aa, synthetic construct
QQSYESPL

SEQ ID NO: 2879 - protein, 8 aa, synthetic construct
QQSYDTPL

SEQ ID NO: 2880 - protein, 8 aa, synthetic construct
QQSYDTPL

SEQ ID NO: 2881 - protein, 8 aa, synthetic construct
QQSYELPL

SEQ ID NO: 2882 - protein, 8 aa, synthetic construct
QQSYDLPL

SEQ ID NO: 2883 - protein, 8 aa, synthetic construct
QQSYDLPL

SEQ ID NO: 2884 - protein, 8 aa, synthetic construct
QQSYDNPL

SEQ ID NO: 2885 - protein, 8 aa, synthetic construct
QQSYDSPL

SEQ ID NO: 2886 - protein, 8 aa, synthetic construct
QQSYDSPL

SEQ ID NO: 2887 - protein, 8 aa, synthetic construct
QQSYDTPL

SEQ ID NO: 2888 - protein, 8 aa, synthetic construct
QQSYNNPL

SEQ ID NO: 2889 - protein, 8 aa, synthetic construct
QQSYDLPL

SEQ ID NO: 2890 - protein, 8 aa, synthetic construct
QQSYDSPL

SEQ ID NO: 2891 - protein, 8 aa, synthetic construct
QQSYSSPL

SEQ ID NO: 2892 - protein, 8 aa, synthetic construct
QQSYSTPL

SEQ ID NO: 2893 - protein, 8 aa, synthetic construct
QQSYDTPL

SEQ ID NO: 2894 - protein, 8 aa, synthetic construct
QQSYDNPL

SEQ ID NO: 2895 - protein, 8 aa, synthetic construct
QQSYDSPL

SEQ ID NO: 2896 - protein, 8 aa, synthetic construct
QQSYDSPL

SEQ ID NO: 2897 - protein, 6 aa, synthetic construct
SSYSMN

SEQ ID NO: 2898 - protein, 6 aa, synthetic construct
SSYSMN

SEQ ID NO: 2899 - protein, 6 aa, synthetic construct
DSYGMN

SEQ ID NO: 2900 - protein, 6 aa, synthetic construct
SSYGMN

SEQ ID NO: 2901 - protein, 6 aa, synthetic construct
DSYGMN

SEQ ID NO: 2902 - protein, 6 aa, synthetic construct
SSYGMN

SEQ ID NO: 2903 - protein, 6 aa, synthetic construct
SSYSMN

SEQ ID NO: 2904 - protein, 6 aa, synthetic construct
SSYSMN

SEQ ID NO: 2905 - protein, 6 aa, synthetic construct
DSYGMN

SEQ ID NO: 2906 - protein, 6 aa, synthetic construct
SSYSMN

SEQ ID NO: 2907 - protein, 6 aa, synthetic construct
SSYGMN

SEQ ID NO: 2908 - protein, 6 aa, synthetic construct
SDYGMN

SEQ ID NO: 2909 - protein, 6 aa, synthetic construct
DSYGMN

SEQ ID NO: 2910 - protein, 6 aa, synthetic construct
DSYSMN

SEQ ID NO: 2911 - protein, 6 aa, synthetic construct
DSYSMN

SEQ ID NO: 2912 - protein, 6 aa, synthetic construct
SSYSMN

SEQ ID NO: 2913 - protein, 6 aa, synthetic construct
SSYSMN

SEQ ID NO: 2914 - protein, 6 aa, synthetic construct
DSYGMN

SEQ ID NO: 2915 - protein, 6 aa, synthetic construct
DSYSMN

SEQ ID NO: 2916 - protein, 6 aa, synthetic construct
DDYSMN

SEQ ID NO: 2917 - protein, 6 aa, synthetic construct
DSYSMN

SEQ ID NO: 2918 - protein, 6 aa, synthetic construct
DSYSMN

SEQ ID NO: 2919 - protein, 6 aa, synthetic construct
SSYSMN

SEQ ID NO: 2920 - protein, 6 aa, synthetic construct
DSYSMN

SEQ ID NO: 2921 - protein, 6 aa, synthetic construct
DSYSMN

SEQ ID NO: 2922 - protein, 6 aa, synthetic construct
SSYGMN

SEQ ID NO: 2923 - protein, 6 aa, synthetic construct
SSYSMN

SEQ ID NO: 2924 - protein, 6 aa, synthetic construct
SSYSMN

SEQ ID NO: 2925 - protein, 6 aa, synthetic construct
SSYSMN

SEQ ID NO: 2926 - protein, 6 aa, synthetic construct
SSYSMN

SEQ ID NO: 2927 - protein, 6 aa, synthetic construct
DSYGMN

SEQ ID NO: 2928 - protein, 6 aa, synthetic construct
DSYSMN

SEQ ID NO: 2929 - protein, 6 aa, synthetic construct
DSYSMN

SEQ ID NO: 2930 - protein, 6 aa, synthetic construct
DSYSMN

SEQ ID NO: 2931 - protein, 6 aa, synthetic construct
DSYSMN

SEQ ID NO: 2932 - protein, 6 aa, synthetic construct
DSYSMN

SEQ ID NO: 2933 - protein, 6 aa, synthetic construct
SDYGMN

SEQ ID NO: 2934 - protein, 6 aa, synthetic construct
SSYGMH

SEQ ID NO: 2935 - protein, 6 aa, synthetic construct
SSYSMN

SEQ ID NO: 2936 - protein, 6 aa, synthetic construct
SSYSMN

SEQ ID NO: 2937 - protein, 6 aa, synthetic construct
DDYSMN

SEQ ID NO: 2938 - protein, 6 aa, synthetic construct
DSYSMN

SEQ ID NO: 2939 - protein, 6 aa, synthetic construct
DSYSMN

SEQ ID NO: 2940 - protein, 6 aa, synthetic construct
SSYGMN

SEQ ID NO: 2941 - protein, 6 aa, synthetic construct
SSYSMN

SEQ ID NO: 2942 - protein, 6 aa, synthetic construct
SSYSMN

SEQ ID NO: 2943 - protein, 6 aa, synthetic construct
SSYSMN

SEQ ID NO: 2944 - protein, 6 aa, synthetic construct
DSYSMN

SEQ ID NO: 2945 - protein, 6 aa, synthetic construct
DSYSMN

SEQ ID NO: 2946 - protein, 6 aa, synthetic construct
DSYSMN

SEQ ID NO: 2947 - protein, 6 aa, synthetic construct
DSYSMN

SEQ ID NO: 2948 - protein, 6 aa, synthetic construct
DSYSMN

SEQ ID NO: 2949 - protein, 6 aa, synthetic construct
SSYSMN

SEQ ID NO: 2950 - protein, 6 aa, synthetic construct
SSYSMN

SEQ ID NO: 2951 - protein, 6 aa, synthetic construct
SSYSMN

SEQ ID NO: 2952 - protein, 6 aa, synthetic construct
SSYSMN

SEQ ID NO: 2953 - protein, 6 aa, synthetic construct
DSYSMN

SEQ ID NO: 2954 - protein, 6 aa, synthetic construct
SSYSMN

SEQ ID NO: 2955 - protein, 6 aa, synthetic construct
DSYSMN

SEQ ID NO: 2956 - protein, 6 aa, synthetic construct
DSYSMN

SEQ ID NO: 2957 - protein, 6 aa, synthetic construct
SSYGMH

SEQ ID NO: 2958 - protein, 6 aa, synthetic construct
SSYSMN

SEQ ID NO: 2959 - protein, 6 aa, synthetic construct
SSYGMN

SEQ ID NO: 2960 - protein, 6 aa, synthetic construct
DSYSMN

SEQ ID NO: 2961 - protein, 6 aa, synthetic construct
DSYSMN

SEQ ID NO: 2962 - protein, 6 aa, synthetic construct
DSYSMN

SEQ ID NO: 2963 - protein, 6 aa, synthetic construct
SDYSMN

SEQ ID NO: 2964 - protein, 6 aa, synthetic construct
SSYSMN

SEQ ID NO: 2965 - protein, 6 aa, synthetic construct
DDYGMN

SEQ ID NO: 2966 - protein, 6 aa, synthetic construct
DSYGMH

SEQ ID NO: 2967 - protein, 6 aa, synthetic construct
DSYGMH

SEQ ID NO: 2968 - protein, 6 aa, synthetic construct
DSYSMN

SEQ ID NO: 2969 - protein, 6 aa, synthetic construct
DSYSMN

SEQ ID NO: 2970 - protein, 6 aa, synthetic construct
SDYSMN

SEQ ID NO: 2971 - protein, 6 aa, synthetic construct
SSYSMN

SEQ ID NO: 2972 - protein, 6 aa, synthetic construct
DSYSMN

SEQ ID NO: 2973 - protein, 6 aa, synthetic construct
SSYSMN

SEQ ID NO: 2974 - protein, 6 aa, synthetic construct
SDYGMN

SEQ ID NO: 2975 - protein, 6 aa, synthetic construct
SSYSMN

SEQ ID NO: 2976 - protein, 6 aa, synthetic construct
DSYGMH

SEQ ID NO: 2977 - protein, 6 aa, synthetic construct
DSYGMH

SEQ ID NO: 2978 - protein, 6 aa, synthetic construct
SDYGMH

SEQ ID NO: 2979 - protein, 6 aa, synthetic construct
SSYGMH

SEQ ID NO: 2980 - protein, 6 aa, synthetic construct
SSYGMN

SEQ ID NO: 2981 - protein, 6 aa, synthetic construct
SSYSMN

SEQ ID NO: 2982 - protein, 6 aa, synthetic construct
DSYSMN

SEQ ID NO: 2983 - protein, 6 aa, synthetic construct
DDYSMN

SEQ ID NO: 2984 - protein, 6 aa, synthetic construct
SSYSMN

SEQ ID NO: 2985 - protein, 6 aa, synthetic construct
SSYSMN

SEQ ID NO: 2986 - protein, 6 aa, synthetic construct
SDYGMH

SEQ ID NO: 2987 - protein, 6 aa, synthetic construct
SSYGMH

SEQ ID NO: 2988 - protein, 6 aa, synthetic construct
SSYGMN

SEQ ID NO: 2989 - protein, 6 aa, synthetic construct
DSYGMH

SEQ ID NO: 2990 - protein, 6 aa, synthetic construct
SDYSMN

SEQ ID NO: 2991 - protein, 6 aa, synthetic construct
DSYSMN

SEQ ID NO: 2992 - protein, 6 aa, synthetic construct
DSYSMN

SEQ ID NO: 2993 - protein, 6 aa, synthetic construct
DSYSMN

SEQ ID NO: 2994 - protein, 6 aa, synthetic construct
SDYGMN

SEQ ID NO: 2995 - protein, 6 aa, synthetic construct
SSYSMN

SEQ ID NO: 2996 - protein, 6 aa, synthetic construct
DSYSMN

SEQ ID NO: 2997 - protein, 6 aa, synthetic construct
DSYSMN

SEQ ID NO: 2998 - protein, 6 aa, synthetic construct
DSYSMN

SEQ ID NO: 2999 - protein, 6 aa, synthetic construct
DSYSMN

SEQ ID NO: 3000 - protein, 6 aa, synthetic construct
DSYSMN

SEQ ID NO: 3001 - protein, 6 aa, synthetic construct
SSYGMH

SEQ ID NO: 3002 - protein, 6 aa, synthetic construct
SSYGMN

SEQ ID NO: 3003 - protein, 6 aa, synthetic construct
DSYSMN

SEQ ID NO: 3004 - protein, 6 aa, synthetic construct
SDYSMN

SEQ ID NO: 3005 - protein, 6 aa, synthetic construct
SSYSMN

SEQ ID NO: 3006 - protein, 6 aa, synthetic construct
SSYSMN

SEQ ID NO: 3007 - protein, 6 aa, synthetic construct
DDYSMN

SEQ ID NO: 3008 - protein, 6 aa, synthetic construct
DSYSMN

SEQ ID NO: 3009 - protein, 6 aa, synthetic construct
DSYSMN

SEQ ID NO: 3010 - protein, 6 aa, synthetic construct
SDYGMN

SEQ ID NO: 3011 - protein, 6 aa, synthetic construct
SDYSMN

SEQ ID NO: 3012 - protein, 6 aa, synthetic construct
SSYSMN

SEQ ID NO: 3013 - protein, 6 aa, synthetic construct
SSYSMN

SEQ ID NO: 3014 - protein, 6 aa, synthetic construct
SSYSMN

SEQ ID NO: 3015 - protein, 6 aa, synthetic construct
DSYGMN

SEQ ID NO: 3016 - protein, 6 aa, synthetic construct
DSYSMN

SEQ ID NO: 3017 - protein, 6 aa, synthetic construct
DSYSMN

SEQ ID NO: 3018 - protein, 6 aa, synthetic construct
DSYSMN

SEQ ID NO: 3019 - protein, 6 aa, synthetic construct
DSYSMN

SEQ ID NO: 3020 - protein, 6 aa, synthetic construct
SDYSMN

SEQ ID NO: 3021 - protein, 6 aa, synthetic construct
SSYSMN

SEQ ID NO: 3022 - protein, 6 aa, synthetic construct
DSYGMN

SEQ ID NO: 3023 - protein, 6 aa, synthetic construct
DSYGMN

SEQ ID NO: 3024 - protein, 6 aa, synthetic construct
DSYGMN

SEQ ID NO: 3025 - protein, 6 aa, synthetic construct
DSYGMN

SEQ ID NO: 3026 - protein, 6 aa, synthetic construct
DSYSMN

SEQ ID NO: 3027 - protein, 6 aa, synthetic construct
DSYGMN

SEQ ID NO: 3028 - protein, 6 aa, synthetic construct
DSYGMN

SEQ ID NO: 3029 - protein, 6 aa, synthetic construct
DSYSMN

SEQ ID NO: 3030 - protein, 6 aa, synthetic construct
DSYSMN

SEQ ID NO: 3031 - protein, 6 aa, synthetic construct
DSYSMN

SEQ ID NO: 3032 - protein, 6 aa, synthetic construct
SDYGMN

SEQ ID NO: 3033 - protein, 6 aa, synthetic construct
SDYGMN

SEQ ID NO: 3034 - protein, 6 aa, synthetic construct
SSYSMN

SEQ ID NO: 3035 - protein, 6 aa, synthetic construct
DDYSMN

SEQ ID NO: 3036 - protein, 6 aa, synthetic construct
DSYSMN

SEQ ID NO: 3037 - protein, 6 aa, synthetic construct
DSYSMN

SEQ ID NO: 3038 - protein, 6 aa, synthetic construct
DSYSMN

SEQ ID NO: 3039 - protein, 6 aa, synthetic construct
DSYSMN

SEQ ID NO: 3040 - protein, 6 aa, synthetic construct
SSYSMN

SEQ ID NO: 3041 - protein, 6 aa, synthetic construct
DDYSMN

SEQ ID NO: 3042 - protein, 6 aa, synthetic construct
DSYSMN

SEQ ID NO: 3043 - protein, 6 aa, synthetic construct
SDYSMN

SEQ ID NO: 3044 - protein, 6 aa, synthetic construct
SSYSMN

SEQ ID NO: 3045 - protein, 6 aa, synthetic construct
SSYSMN

SEQ ID NO: 3046 - protein, 6 aa, synthetic construct
DSYGMN

SEQ ID NO: 3047 - protein, 6 aa, synthetic construct
SSYGMN

SEQ ID NO: 3048 - protein, 6 aa, synthetic construct
DSYSMN

SEQ ID NO: 3049 - protein, 6 aa, synthetic construct
DSYSMN

SEQ ID NO: 3050 - protein, 6 aa, synthetic construct
DDYGMN

SEQ ID NO: 3051 - protein, 6 aa, synthetic construct
SSYGMN

SEQ ID NO: 3052 - protein, 6 aa, synthetic construct
SDYGMN

SEQ ID NO: 3053 - protein, 6 aa, synthetic construct
DSYGMH

SEQ ID NO: 3054 - protein, 6 aa, synthetic construct
SDYGMN

SEQ ID NO: 3055 - protein, 6 aa, synthetic construct
SSYSMH

SEQ ID NO: 3056 - protein, 6 aa, synthetic construct
SSYSMN

SEQ ID NO: 3057 - protein, 6 aa, synthetic construct
DSYSMN

SEQ ID NO: 3058 - protein, 6 aa, synthetic construct
SDYSMN

SEQ ID NO: 3059 - protein, 6 aa, synthetic construct
SSYSMN

SEQ ID NO: 3060 - protein, 6 aa, synthetic construct
DDYGMN

SEQ ID NO: 3061 - protein, 6 aa, synthetic construct
SSYGMN

SEQ ID NO: 3062 - protein, 6 aa, synthetic construct
DSYSMN

SEQ ID NO: 3063 - protein, 6 aa, synthetic construct
DSYSMN

SEQ ID NO: 3064 - protein, 6 aa, synthetic construct
SSYSMN

SEQ ID NO: 3065 - protein, 6 aa, synthetic construct
SSYGMN

SEQ ID NO: 3066 - protein, 13 aa, synthetic construct
WVANINYNGGYTS

SEQ ID NO: 3067 - protein, 13 aa, synthetic construct
WVAGINYNGGYKG

SEQ ID NO: 3068 - protein, 13 aa, synthetic construct
WVAGINYNGGYTG

SEQ ID NO: 3069 - protein, 13 aa, synthetic construct
WVAGINYNGGYTS

SEQ ID NO: 3070 - protein, 13 aa, synthetic construct
WVAGINYNSGYTS

SEQ ID NO: 3071 - protein, 13 aa, synthetic construct
WVAGINYNSGYTS

SEQ ID NO: 3072 - protein, 13 aa, synthetic construct
WVANINYNGGYTG

SEQ ID NO: 3073 - protein, 13 aa, synthetic construct
WVANINYNGGYTG

SEQ ID NO: 3074 - protein, 13 aa, synthetic construct
WVANINYNGGYTS

SEQ ID NO: 3075 - protein, 13 aa, synthetic construct
WVANINYNGGYTS

SEQ ID NO: 3076 - protein, 13 aa, synthetic construct
WVASINYNGGYTG

SEQ ID NO: 3077 - protein, 13 aa, synthetic construct
WVASINYNGGYTS

SEQ ID NO: 3078 - protein, 13 aa, synthetic construct
WVSGINYNSGYKS

SEQ ID NO: 3079 - protein, 13 aa, synthetic construct
WVSGINYNSGYTS

SEQ ID NO: 3080 - protein, 13 aa, synthetic construct
WVSGINYNSGYTS

SEQ ID NO: 3081 - protein, 13 aa, synthetic construct
WVSNINYNGGYKS

SEQ ID NO: 3082 - protein, 13 aa, synthetic construct
WVSNINYNGGYKS

SEQ ID NO: 3083 - protein, 13 aa, synthetic construct
WVSNINYNGGYTG

SEQ ID NO: 3084 - protein, 13 aa, synthetic construct
WVAGINYNGGYKG

SEQ ID NO: 3085 - protein, 13 aa, synthetic construct
WVAGINYNGGYKS

SEQ ID NO: 3086 - protein, 13 aa, synthetic construct
WVAGINYNGGYKS

SEQ ID NO: 3087 - protein, 13 aa, synthetic construct
WVAGINYNGGYKS

SEQ ID NO: 3088 - protein, 13 aa, synthetic construct
WVAGINYNGGYKS

SEQ ID NO: 3089 - protein, 13 aa, synthetic construct
WVAGINYNGGYTG

SEQ ID NO: 3090 - protein, 13 aa, synthetic construct
WVAGINYNGGYTG

SEQ ID NO: 3091 - protein, 13 aa, synthetic construct
WVAGINYNGGYTG

SEQ ID NO: 3092 - protein, 13 aa, synthetic construct
WVAGINYNGGYTG

SEQ ID NO: 3093 - protein, 13 aa, synthetic construct
WVAGINYNGGYTG

SEQ ID NO: 3094 - protein, 13 aa, synthetic construct
WVAGINYNGGYTG

SEQ ID NO: 3095 - protein, 13 aa, synthetic construct
WVAGINYNGGYTG

SEQ ID NO: 3096 - protein, 13 aa, synthetic construct
WVAGINYNGGYTS

SEQ ID NO: 3097 - protein, 13 aa, synthetic construct
WVAGINYNGGYTS

SEQ ID NO: 3098 - protein, 13 aa, synthetic construct
WVAGINYNGGYTS

SEQ ID NO: 3099 - protein, 13 aa, synthetic construct
WVAGINYNGGYTS

SEQ ID NO: 3100 - protein, 13 aa, synthetic construct
WVAGINYNGGYTS

SEQ ID NO: 3101 - protein, 13 aa, synthetic construct
WVAGINYNGGYTS

SEQ ID NO: 3102 - protein, 13 aa, synthetic construct
WVAGINYNGGYTS

SEQ ID NO: 3103 - protein, 13 aa, synthetic construct
WVAGINYNGGYTS

SEQ ID NO: 3104 - protein, 13 aa, synthetic construct
WVAGINYNGGYTS

SEQ ID NO: 3105 - protein, 13 aa, synthetic construct
WVAGINYNGGYTS

SEQ ID NO: 3106 - protein, 13 aa, synthetic construct
WVAGINYNSGYKG

SEQ ID NO: 3107 - protein, 13 aa, synthetic construct
WVAGINYNSGYKG

SEQ ID NO: 3108 - protein, 13 aa, synthetic construct
WVAGINYNSGYKG

SEQ ID NO: 3109 - protein, 13 aa, synthetic construct
WVAGINYNSGYKG

SEQ ID NO: 3110 - protein, 13 aa, synthetic construct
WVAGINYNSGYKG

SEQ ID NO: 3111 - protein, 13 aa, synthetic construct
WVAGINYNSGYKG

SEQ ID NO: 3112 - protein, 13 aa, synthetic construct
WVAGINYNSGYKG

SEQ ID NO: 3113 - protein, 13 aa, synthetic construct
WVAGINYNSGYKS

SEQ ID NO: 3114 - protein, 13 aa, synthetic construct
WVAGINYNSGYKS

SEQ ID NO: 3115 - protein, 13 aa, synthetic construct
WVAGINYNSGYKS

SEQ ID NO: 3116 - protein, 13 aa, synthetic construct
WVAGINYNSGYKS

SEQ ID NO: 3117 - protein, 13 aa, synthetic construct
WVAGINYNSGYKS

SEQ ID NO: 3118 - protein, 13 aa, synthetic construct
WVAGINYNSGYKS

SEQ ID NO: 3119 - protein, 13 aa, synthetic construct
WVAGINYNSGYKS

SEQ ID NO: 3120 - protein, 13 aa, synthetic construct
WVAGINYNSGYKS

SEQ ID NO: 3121 - protein, 13 aa, synthetic construct
WVAGINYNSGYKS

SEQ ID NO: 3122 - protein, 13 aa, synthetic construct
WVAGINYNSGYTG

SEQ ID NO: 3123 - protein, 13 aa, synthetic construct
WVAGINYNSGYTG

SEQ ID NO: 3124 - protein, 13 aa, synthetic construct
WVAGINYNSGYTS

SEQ ID NO: 3125 - protein, 13 aa, synthetic construct
WVAGINYNSGYTS

SEQ ID NO: 3126 - protein, 13 aa, synthetic construct
WVAGINYNSGYTS

SEQ ID NO: 3127 - protein, 13 aa, synthetic construct
WVAGINYNSGYTS

SEQ ID NO: 3128 - protein, 13 aa, synthetic construct
WVANINYNGGYKG

SEQ ID NO: 3129 - protein, 13 aa, synthetic construct
WVANINYNGGYTG

SEQ ID NO: 3130 - protein, 13 aa, synthetic construct
WVANINYNGGYTG

SEQ ID NO: 3131 - protein, 13 aa, synthetic construct
WVANINYNGGYTG

SEQ ID NO: 3132 - protein, 13 aa, synthetic construct
WVANINYNGGYTG

SEQ ID NO: 3133 - protein, 13 aa, synthetic construct
WVANINYNGGYTG

SEQ ID NO: 3134 - protein, 13 aa, synthetic construct
WVANINYNGGYTS

SEQ ID NO: 3135 - protein, 13 aa, synthetic construct
WVANINYNGGYTS

SEQ ID NO: 3136 - protein, 13 aa, synthetic construct
WVANINYNGGYTS

SEQ ID NO: 3137 - protein, 13 aa, synthetic construct
WVANINYNGGYTS

SEQ ID NO: 3138 - protein, 13 aa, synthetic construct
WVANINYNSGYKG

SEQ ID NO: 3139 - protein, 13 aa, synthetic construct
WVANINYNSGYKG

SEQ ID NO: 3140 - protein, 13 aa, synthetic construct
WVANINYNSGYKG

SEQ ID NO: 3141 - protein, 13 aa, synthetic construct
WVANINYNSGYTG

SEQ ID NO: 3142 - protein, 13 aa, synthetic construct
WVANINYNSGYTG

SEQ ID NO: 3143 - protein, 13 aa, synthetic construct
WVASINYNGGYTG

SEQ ID NO: 3144 - protein, 13 aa, synthetic construct
WVASINYNGGYTG

SEQ ID NO: 3145 - protein, 13 aa, synthetic construct
WVASINYNGGYTS

SEQ ID NO: 3146 - protein, 13 aa, synthetic construct
WVASINYNGGYTS

SEQ ID NO: 3147 - protein, 13 aa, synthetic construct
WVASINYNGGYTS

SEQ ID NO: 3148 - protein, 13 aa, synthetic construct
WVASINYNGGYTS

SEQ ID NO: 3149 - protein, 13 aa, synthetic construct
WVASINYNGGYTS

SEQ ID NO: 3150 - protein, 13 aa, synthetic construct
WVASINYNGGYTS

SEQ ID NO: 3151 - protein, 13 aa, synthetic construct
WVASINYNSGYKG

SEQ ID NO: 3152 - protein, 13 aa, synthetic construct
WVASINYNSGYKS

SEQ ID NO: 3153 - protein, 13 aa, synthetic construct
WVASINYNSGYKS

SEQ ID NO: 3154 - protein, 13 aa, synthetic construct
WVASINYNSGYKS

SEQ ID NO: 3155 - protein, 13 aa, synthetic construct
WVASINYNSGYTS

SEQ ID NO: 3156 - protein, 13 aa, synthetic construct
WVASINYNSGYTS

SEQ ID NO: 3157 - protein, 13 aa, synthetic construct
WVASINYNSGYTS

SEQ ID NO: 3158 - protein, 13 aa, synthetic construct
WVSGINYNGGYKG

SEQ ID NO: 3159 - protein, 13 aa, synthetic construct
WVSGINYNGGYKG

SEQ ID NO: 3160 - protein, 13 aa, synthetic construct
WVSGINYNGGYKS

SEQ ID NO: 3161 - protein, 13 aa, synthetic construct
WVSGINYNGGYKS

SEQ ID NO: 3162 - protein, 13 aa, synthetic construct
WVSGINYNGGYKS

SEQ ID NO: 3163 - protein, 13 aa, synthetic construct
WVSGINYNGGYKS

SEQ ID NO: 3164 - protein, 13 aa, synthetic construct
WVSGINYNGGYKS

SEQ ID NO: 3165 - protein, 13 aa, synthetic construct
WVSGINYNGGYTG

SEQ ID NO: 3166 - protein, 13 aa, synthetic construct
WVSGINYNGGYTG

SEQ ID NO: 3167 - protein, 13 aa, synthetic construct
WVSGINYNGGYTG

SEQ ID NO: 3168 - protein, 13 aa, synthetic construct
WVSGINYNGGYTG

SEQ ID NO: 3169 - protein, 13 aa, synthetic construct
WVSGINYNGGYTS

SEQ ID NO: 3170 - protein, 13 aa, synthetic construct
WVSGINYNGGYTS

SEQ ID NO: 3171 - protein, 13 aa, synthetic construct
WVSGINYNGGYTS

SEQ ID NO: 3172 - protein, 13 aa, synthetic construct
WVSGINYNSGYKG

SEQ ID NO: 3173 - protein, 13 aa, synthetic construct
WVSGINYNSGYKG

SEQ ID NO: 3174 - protein, 13 aa, synthetic construct
WVSGINYNSGYKG

SEQ ID NO: 3175 - protein, 13 aa, synthetic construct
WVSGINYNSGYKG

SEQ ID NO: 3176 - protein, 13 aa, synthetic construct
WVSGINYNSGYKS

SEQ ID NO: 3177 - protein, 13 aa, synthetic construct
WVSGINYNSGYKS

SEQ ID NO: 3178 - protein, 13 aa, synthetic construct
WVSGINYNSGYKS

SEQ ID NO: 3179 - protein, 13 aa, synthetic construct
WVSGINYNSGYKS

SEQ ID NO: 3180 - protein, 13 aa, synthetic construct
WVSGINYNSGYKS

SEQ ID NO: 3181 - protein, 13 aa, synthetic construct
WVSGINYNSGYKS

SEQ ID NO: 3182 - protein, 13 aa, synthetic construct
WVSGINYNSGYKS

SEQ ID NO: 3183 - protein, 13 aa, synthetic construct
WVSGINYNSGYKS

SEQ ID NO: 3184 - protein, 13 aa, synthetic construct
WVSGINYNSGYTS

SEQ ID NO: 3185 - protein, 13 aa, synthetic construct
WVSGINYNSGYTS

SEQ ID NO: 3186 - protein, 13 aa, synthetic construct
WVSGINYNSGYTS

SEQ ID NO: 3187 - protein, 13 aa, synthetic construct
WVSGINYNSGYTS

SEQ ID NO: 3188 - protein, 13 aa, synthetic construct
WVSGINYNSGYTS

SEQ ID NO: 3189 - protein, 13 aa, synthetic construct
WVSGINYNSGYTS

SEQ ID NO: 3190 - protein, 13 aa, synthetic construct
WVSGINYNSGYTS

SEQ ID NO: 3191 - protein, 13 aa, synthetic construct
WVSNINYNGGYKG

SEQ ID NO: 3192 - protein, 13 aa, synthetic construct
WVSNINYNGGYKG

SEQ ID NO: 3193 - protein, 13 aa, synthetic construct
WVSNINYNGGYKS

SEQ ID NO: 3194 - protein, 13 aa, synthetic construct
WVSNINYNGGYKS

SEQ ID NO: 3195 - protein, 13 aa, synthetic construct
WVSNINYNGGYKS

SEQ ID NO: 3196 - protein, 13 aa, synthetic construct
WVSNINYNGGYTG

SEQ ID NO: 3197 - protein, 13 aa, synthetic construct
WVSNINYNGGYTG

SEQ ID NO: 3198 - protein, 13 aa, synthetic construct
WVSNINYNGGYTG

SEQ ID NO: 3199 - protein, 13 aa, synthetic construct
WVSNINYNGGYTG

SEQ ID NO: 3200 - protein, 13 aa, synthetic construct
WVSNINYNGGYTG

SEQ ID NO: 3201 - protein, 13 aa, synthetic construct
WVSNINYNGGYTG

SEQ ID NO: 3202 - protein, 13 aa, synthetic construct
WVSNINYNGGYTG

SEQ ID NO: 3203 - protein, 13 aa, synthetic construct
WVSNINYNGGYTG

SEQ ID NO: 3204 - protein, 13 aa, synthetic construct
WVSNINYNGGYTS

SEQ ID NO: 3205 - protein, 13 aa, synthetic construct
WVSNINYNGGYTS

SEQ ID NO: 3206 - protein, 13 aa, synthetic construct
WVSNINYNGGYTS

SEQ ID NO: 3207 - protein, 13 aa, synthetic construct
WVSNINYNGGYTS

SEQ ID NO: 3208 - protein, 13 aa, synthetic construct
WVSNINYNGGYTS

SEQ ID NO: 3209 - protein, 13 aa, synthetic construct
WVSNINYNGGYTS

SEQ ID NO: 3210 - protein, 13 aa, synthetic construct
WVSNINYNSGYKG

SEQ ID NO: 3211 - protein, 13 aa, synthetic construct
WVSNINYNSGYKG

SEQ ID NO: 3212 - protein, 13 aa, synthetic construct
WVSNINYNSGYKG

SEQ ID NO: 3213 - protein, 13 aa, synthetic construct
WVSNINYNSGYKG

SEQ ID NO: 3214 - protein, 13 aa, synthetic construct
WVSNINYNSGYKG

SEQ ID NO: 3215 - protein, 13 aa, synthetic construct
WVSNINYNSGYTG

SEQ ID NO: 3216 - protein, 13 aa, synthetic construct
WVSNINYNSGYTG

SEQ ID NO: 3217 - protein, 13 aa, synthetic construct
WVSNINYNSGYTS

SEQ ID NO: 3218 - protein, 13 aa, synthetic construct
WVSNINYNSGYTS

SEQ ID NO: 3219 - protein, 13 aa, synthetic construct
WVSSINYNGGYKS

SEQ ID NO: 3220 - protein, 13 aa, synthetic construct
WVSSINYNGGYKS

SEQ ID NO: 3221 - protein, 13 aa, synthetic construct
WVSSINYNGGYTG

SEQ ID NO: 3222 - protein, 13 aa, synthetic construct
WVSSINYNGGYTS

SEQ ID NO: 3223 - protein, 13 aa, synthetic construct
WVSSINYNGGYTS

SEQ ID NO: 3224 - protein, 13 aa, synthetic construct
WVSSINYNGGYTS

SEQ ID NO: 3225 - protein, 13 aa, synthetic construct
WVSSINYNGGYTS

SEQ ID NO: 3226 - protein, 13 aa, synthetic construct
WVSSINYNSGYKG

SEQ ID NO: 3227 - protein, 13 aa, synthetic construct
WVSSINYNSGYKG

SEQ ID NO: 3228 - protein, 13 aa, synthetic construct
WVSSINYNSGYKG

SEQ ID NO: 3229 - protein, 13 aa, synthetic construct
WVSSINYNSGYKS

SEQ ID NO: 3230 - protein, 13 aa, synthetic construct
WVSSINYNSGYKS

SEQ ID NO: 3231 - protein, 13 aa, synthetic construct
WVSSINYNSGYTG

SEQ ID NO: 3232 - protein, 13 aa, synthetic construct
WVSSINYNSGYTG

SEQ ID NO: 3233 - protein, 13 aa, synthetic construct
WVSSINYNSGYTG

SEQ ID NO: 3234 - protein, 13 aa, synthetic construct
WVSSINYNSGYTS

SEQ ID NO: 3235 - protein, 12 aa, synthetic construct
AKSATWHDTHLD

SEQ ID NO: 3236 - protein, 12 aa, synthetic construct
ARSATWHDTALD

SEQ ID NO: 3237 - protein, 12 aa, synthetic construct
ARSATWHDTALD

SEQ ID NO: 3238 - protein, 12 aa, synthetic construct
ARSATWHDTALD

SEQ ID NO: 3239 - protein, 12 aa, synthetic construct
ARSATWHDTALD

SEQ ID NO: 3240 - protein, 12 aa, synthetic construct
ARSATWHDTALD

SEQ ID NO: 3241 - protein, 12 aa, synthetic construct
ARSATWHDTALD

SEQ ID NO: 3242 - protein, 12 aa, synthetic construct
ARSATWHDTALD

SEQ ID NO: 3243 - protein, 12 aa, synthetic construct
ARSATWHDTALD

SEQ ID NO: 3244 - protein, 12 aa, synthetic construct
ARSATWHDTALD

SEQ ID NO: 3245 - protein, 12 aa, synthetic construct
ARSATWHDTALD

SEQ ID NO: 3246 - protein, 12 aa, synthetic construct
ARSATWHDTALD

SEQ ID NO: 3247 - protein, 12 aa, synthetic construct
ARSATWHDTALD

SEQ ID NO: 3248 - protein, 12 aa, synthetic construct
ARSATWHDTALD

SEQ ID NO: 3249 - protein, 12 aa, synthetic construct
ARSATWHDTALD

SEQ ID NO: 3250 - protein, 12 aa, synthetic construct
ARSATWHDTALD

SEQ ID NO: 3251 - protein, 12 aa, synthetic construct
ARSATWHDTALD

SEQ ID NO: 3252 - protein, 12 aa, synthetic construct
ARSATWHDTALD

SEQ ID NO: 3253 - protein, 12 aa, synthetic construct
ARSATWHDTHLD

SEQ ID NO: 3254 - protein, 12 aa, synthetic construct
ARSATWHDTHLD

SEQ ID NO: 3255 - protein, 12 aa, synthetic construct
ARSATWHDTHLD

SEQ ID NO: 3256 - protein, 12 aa, synthetic construct
ARSATWHDTHLD

SEQ ID NO: 3257 - protein, 12 aa, synthetic construct
ARSATWHDTHLD

SEQ ID NO: 3258 - protein, 12 aa, synthetic construct
ARSATWHDTHLD

SEQ ID NO: 3259 - protein, 12 aa, synthetic construct
ARSATWHDTHLD

SEQ ID NO: 3260 - protein, 12 aa, synthetic construct
ARSATWHDTHLD

SEQ ID NO: 3261 - protein, 12 aa, synthetic construct
ARSATWHDTHLD

SEQ ID NO: 3262 - protein, 12 aa, synthetic construct
ARSATWHDTHLD

SEQ ID NO: 3263 - protein, 12 aa, synthetic construct
ARSATWHDTHLD

SEQ ID NO: 3264 - protein, 12 aa, synthetic construct
ARSATWHDTHLD

SEQ ID NO: 3265 - protein, 12 aa, synthetic construct
ARSATWHDTHLD

SEQ ID NO: 3266 - protein, 12 aa, synthetic construct
ARSATWHDTHLD

SEQ ID NO: 3267 - protein, 12 aa, synthetic construct
ARSATWHDTHLD

SEQ ID NO: 3268 - protein, 12 aa, synthetic construct
ARSATWHDTHLD

SEQ ID NO: 3269 - protein, 12 aa, synthetic construct
ARSATWHDTHLD

SEQ ID NO: 3270 - protein, 12 aa, synthetic construct
ARSATWHDTHLD

SEQ ID NO: 3271 - protein, 12 aa, synthetic construct
ARSATWHDTHLD

SEQ ID NO: 3272 - protein, 12 aa, synthetic construct
ARSATWHDTHLD

SEQ ID NO: 3273 - protein, 12 aa, synthetic construct
ARSATWHDTHLD

SEQ ID NO: 3274 - protein, 12 aa, synthetic construct
ARSATWHDTHLD

SEQ ID NO: 3275 - protein, 12 aa, synthetic construct
ARSATWHDTHLD

SEQ ID NO: 3276 - protein, 12 aa, synthetic construct
ARSATWHDTHLD

SEQ ID NO: 3277 - protein, 12 aa, synthetic construct
ARSATWHDTHLD

SEQ ID NO: 3278 - protein, 12 aa, synthetic construct
ARSATWHDTHLD

SEQ ID NO: 3279 - protein, 12 aa, synthetic construct
ARSATWHDTHLD

SEQ ID NO: 3280 - protein, 12 aa, synthetic construct
ARSATWHDTHLD

SEQ ID NO: 3281 - protein, 12 aa, synthetic construct
ARSATWHDTHLD

SEQ ID NO: 3282 - protein, 12 aa, synthetic construct
ARSATWHDTHLD

SEQ ID NO: 3283 - protein, 12 aa, synthetic construct
ARSATWHDTHLD

SEQ ID NO: 3284 - protein, 12 aa, synthetic construct
ARSATWHDTHLD

SEQ ID NO: 3285 - protein, 12 aa, synthetic construct
ARSATWHDTHLD

SEQ ID NO: 3286 - protein, 12 aa, synthetic construct
ARSATWHDTHLD

SEQ ID NO: 3287 - protein, 12 aa, synthetic construct
ARSATWHDTHLD

SEQ ID NO: 3288 - protein, 12 aa, synthetic construct
ARSATWHDTHLD

SEQ ID NO: 3289 - protein, 12 aa, synthetic construct
ARSATWHDTHLD

SEQ ID NO: 3290 - protein, 12 aa, synthetic construct
ARSATWHDTHLD

SEQ ID NO: 3291 - protein, 12 aa, synthetic construct
ARSATWHDTHLD

SEQ ID NO: 3292 - protein, 12 aa, synthetic construct
ARSATWHDTHLD

SEQ ID NO: 3293 - protein, 12 aa, synthetic construct
ARSATWHDTHLD

SEQ ID NO: 3294 - protein, 12 aa, synthetic construct
ARSATWHDTHLD

SEQ ID NO: 3295 - protein, 12 aa, synthetic construct
ARSATWHDTHLD

SEQ ID NO: 3296 - protein, 12 aa, synthetic construct
ARSATWHDTHLD

SEQ ID NO: 3297 - protein, 12 aa, synthetic construct
ARSATWHDTHLD

SEQ ID NO: 3298 - protein, 12 aa, synthetic construct
ARSATWHDTHLD

SEQ ID NO: 3299 - protein, 12 aa, synthetic construct
ARSATWHDTHLD

SEQ ID NO: 3300 - protein, 12 aa, synthetic construct
ARSATWHDTHLD

SEQ ID NO: 3301 - protein, 12 aa, synthetic construct
ARSATWHDTHLD

SEQ ID NO: 3302 - protein, 12 aa, synthetic construct
ARSATWHDTHLD

SEQ ID NO: 3303 - protein, 12 aa, synthetic construct
ARSATWHDTHLD

SEQ ID NO: 3304 - protein, 12 aa, synthetic construct
ARSATWHDTHLD

SEQ ID NO: 3305 - protein, 12 aa, synthetic construct
ARSATWHDTHLD

SEQ ID NO: 3306 - protein, 12 aa, synthetic construct
ARSATWHDTHLD

SEQ ID NO: 3307 - protein, 12 aa, synthetic construct
ARSATWHDTHLD

SEQ ID NO: 3308 - protein, 12 aa, synthetic construct
ARSATWHDTHLD

SEQ ID NO: 3309 - protein, 12 aa, synthetic construct
ARSATWHDTHLD

SEQ ID NO: 3310 - protein, 12 aa, synthetic construct
ARSATWHDTHLD

SEQ ID NO: 3311 - protein, 12 aa, synthetic construct
ARSATWHDTHLD

SEQ ID NO: 3312 - protein, 12 aa, synthetic construct
ARSATWHDTHLD

SEQ ID NO: 3313 - protein, 12 aa, synthetic construct
ARSATWHDTHLD

SEQ ID NO: 3314 - protein, 12 aa, synthetic construct
ARSATWHDTHLD

SEQ ID NO: 3315 - protein, 12 aa, synthetic construct
ARSATWHDTHLD

SEQ ID NO: 3316 - protein, 12 aa, synthetic construct
ARSATWHDTHLD

SEQ ID NO: 3317 - protein, 12 aa, synthetic construct
ARSATWHDTHLD

SEQ ID NO: 3318 - protein, 12 aa, synthetic construct
ARSATWHDTHLD

SEQ ID NO: 3319 - protein, 12 aa, synthetic construct
ARSATWHDTHLD

SEQ ID NO: 3320 - protein, 12 aa, synthetic construct
ARSATWHDTHLD

SEQ ID NO: 3321 - protein, 12 aa, synthetic construct
ARSATWHDTHLD

SEQ ID NO: 3322 - protein, 12 aa, synthetic construct
ARSATWHDTHLD

SEQ ID NO: 3323 - protein, 12 aa, synthetic construct
ARSATWHDTHLD

SEQ ID NO: 3324 - protein, 12 aa, synthetic construct
ARSATWHDTHLD

SEQ ID NO: 3325 - protein, 12 aa, synthetic construct
ARSATWHDTHLD

SEQ ID NO: 3326 - protein, 12 aa, synthetic construct
ARSATWHDTHLD

SEQ ID NO: 3327 - protein, 12 aa, synthetic construct
ARSATWHDTHLD

SEQ ID NO: 3328 - protein, 12 aa, synthetic construct
ARSATWHDTHLD

SEQ ID NO: 3329 - protein, 12 aa, synthetic construct
ARSATWHDTHLD

SEQ ID NO: 3330 - protein, 12 aa, synthetic construct
ARSATWHDTHLD

SEQ ID NO: 3331 - protein, 12 aa, synthetic construct
ARSATWHDTHLD

SEQ ID NO: 3332 - protein, 12 aa, synthetic construct
ARSATWHDTHLD

SEQ ID NO: 3333 - protein, 12 aa, synthetic construct
ARSATWHDTHLD

SEQ ID NO: 3334 - protein, 12 aa, synthetic construct
ARSATWHDTHLD

SEQ ID NO: 3335 - protein, 12 aa, synthetic construct
ARSATWHDTHLD

SEQ ID NO: 3336 - protein, 12 aa, synthetic construct
ARSATWHDTHLD

SEQ ID NO: 3337 - protein, 12 aa, synthetic construct
ARSATWHDTHLD

SEQ ID NO: 3338 - protein, 12 aa, synthetic construct
ARSATWHDTHLD

SEQ ID NO: 3339 - protein, 12 aa, synthetic construct
ARSATWHDTHLD

SEQ ID NO: 3340 - protein, 12 aa, synthetic construct
ARSATWHDTHLD

SEQ ID NO: 3341 - protein, 12 aa, synthetic construct
ARSATWHDTHLD

SEQ ID NO: 3342 - protein, 12 aa, synthetic construct
ARSATWHDTHLD

SEQ ID NO: 3343 - protein, 12 aa, synthetic construct
ARSATWHDTHLD

SEQ ID NO: 3344 - protein, 12 aa, synthetic construct
ARSATWHDTHLD

SEQ ID NO: 3345 - protein, 12 aa, synthetic construct
ARSATWHDTHLD

SEQ ID NO: 3346 - protein, 12 aa, synthetic construct
ARSATWHDTHLD

SEQ ID NO: 3347 - protein, 12 aa, synthetic construct
ARSATWHDTHLD

SEQ ID NO: 3348 - protein, 12 aa, synthetic construct
ARSATWHDTHLD

SEQ ID NO: 3349 - protein, 12 aa, synthetic construct
ARSATWHDTHLD

SEQ ID NO: 3350 - protein, 12 aa, synthetic construct
ARSATWHDTHLD

SEQ ID NO: 3351 - protein, 12 aa, synthetic construct
ARSATWHDTHLD

SEQ ID NO: 3352 - protein, 12 aa, synthetic construct
ARSATWHDTHLD

SEQ ID NO: 3353 - protein, 12 aa, synthetic construct
ARSATWHDTHLD

SEQ ID NO: 3354 - protein, 12 aa, synthetic construct
ARSATWHDTHLD

SEQ ID NO: 3355 - protein, 12 aa, synthetic construct
ARSATWHDTHLD

SEQ ID NO: 3356 - protein, 12 aa, synthetic construct
ARSATWHDTHLD

SEQ ID NO: 3357 - protein, 12 aa, synthetic construct
ARSATWHDTHLD

SEQ ID NO: 3358 - protein, 12 aa, synthetic construct
ARSATWHDTHLD

SEQ ID NO: 3359 - protein, 12 aa, synthetic construct
ARSATWHDTHLD

SEQ ID NO: 3360 - protein, 12 aa, synthetic construct
ARSATWHDTHLD

SEQ ID NO: 3361 - protein, 12 aa, synthetic construct
ARSATWHDTHLD

SEQ ID NO: 3362 - protein, 12 aa, synthetic construct
ARSATWHDTHLD

SEQ ID NO: 3363 - protein, 12 aa, synthetic construct
ARSATWHDTHLD

SEQ ID NO: 3364 - protein, 12 aa, synthetic construct
ARSATWHDTHLD

SEQ ID NO: 3365 - protein, 12 aa, synthetic construct
ARSATWHDTHLD

SEQ ID NO: 3366 - protein, 12 aa, synthetic construct
ARSATWHDTHLD

SEQ ID NO: 3367 - protein, 12 aa, synthetic construct
ARSATWHDTHLD

SEQ ID NO: 3368 - protein, 12 aa, synthetic construct
ARSATWHDTHLD

SEQ ID NO: 3369 - protein, 12 aa, synthetic construct
ARSATWHDTHLD

SEQ ID NO: 3370 - protein, 12 aa, synthetic construct
ARSATWHDTHLD

SEQ ID NO: 3371 - protein, 12 aa, synthetic construct
ARSATWHDTHLD

SEQ ID NO: 3372 - protein, 12 aa, synthetic construct
ARSATWHDTHLD

SEQ ID NO: 3373 - protein, 12 aa, synthetic construct
ARSATWHDTHLD

SEQ ID NO: 3374 - protein, 12 aa, synthetic construct
ARSATWHDTHLD

SEQ ID NO: 3375 - protein, 12 aa, synthetic construct
ARSATWHDTHLD

SEQ ID NO: 3376 - protein, 12 aa, synthetic construct
ARSATWHDTHLD

SEQ ID NO: 3377 - protein, 12 aa, synthetic construct
ARSATWHDTHLD

SEQ ID NO: 3378 - protein, 12 aa, synthetic construct
ARSATWHDTHLD

SEQ ID NO: 3379 - protein, 12 aa, synthetic construct
ARSATWHDTHLD

SEQ ID NO: 3380 - protein, 12 aa, synthetic construct
ARSATWHDTHLD

SEQ ID NO: 3381 - protein, 12 aa, synthetic construct
ARSATWHDTHLD

SEQ ID NO: 3382 - protein, 12 aa, synthetic construct
ARSATWHDTHLD

SEQ ID NO: 3383 - protein, 12 aa, synthetic construct
ARSATWHDTHLD

SEQ ID NO: 3384 - protein, 12 aa, synthetic construct
ARSATWHDTHLD

SEQ ID NO: 3385 - protein, 12 aa, synthetic construct
ARSATWHDTHLD

SEQ ID NO: 3386 - protein, 12 aa, synthetic construct
ARSATWHDTHLD

SEQ ID NO: 3387 - protein, 12 aa, synthetic construct
ARSATWHDTHLD

SEQ ID NO: 3388 - protein, 12 aa, synthetic construct
ARSATWHDTHLD

SEQ ID NO: 3389 - protein, 12 aa, synthetic construct
ARSATWHDTHLD

SEQ ID NO: 3390 - protein, 12 aa, synthetic construct
ARSATWHDTHLD

SEQ ID NO: 3391 - protein, 12 aa, synthetic construct
ARSATWHDTHLD

SEQ ID NO: 3392 - protein, 12 aa, synthetic construct
ARSATWHDTHLD

SEQ ID NO: 3393 - protein, 12 aa, synthetic construct
ARSATWHDTHLD

SEQ ID NO: 3394 - protein, 12 aa, synthetic construct
ARSATWHDTHLD

SEQ ID NO: 3395 - protein, 12 aa, synthetic construct
ARSATWHDTHLD

SEQ ID NO: 3396 - protein, 12 aa, synthetic construct
ARSATWHDTHLD

SEQ ID NO: 3397 - protein, 12 aa, synthetic construct
ARSATWHDTHLD

SEQ ID NO: 3398 - protein, 12 aa, synthetic construct
ARSATWHDTHLD

SEQ ID NO: 3399 - protein, 12 aa, synthetic construct
ARSATWHDTHLD

SEQ ID NO: 3400 - protein, 12 aa, synthetic construct
ARSATWHDTHLD

SEQ ID NO: 3401 - protein, 12 aa, synthetic construct
ARSATWHDTHLD

SEQ ID NO: 3402 - protein, 12 aa, synthetic construct
ARSATWHDTHLD

SEQ ID NO: 3403 - protein, 12 aa, synthetic construct
ARSATWHDTHLD

SEQ ID NO: 3404 - protein, 7 aa, synthetic construct
ISYLNWY

SEQ ID NO: 3405 - protein, 7 aa, synthetic construct
ITYLNWY

SEQ ID NO: 3406 - protein, 7 aa, synthetic construct
ITYLNWY

SEQ ID NO: 3407 - protein, 7 aa, synthetic construct
LSYLNWY

SEQ ID NO: 3408 - protein, 7 aa, synthetic construct
LSYLNWY

SEQ ID NO: 3409 - protein, 7 aa, synthetic construct
LSYVNWY

SEQ ID NO: 3410 - protein, 7 aa, synthetic construct
LSYVNWY

SEQ ID NO: 3411 - protein, 7 aa, synthetic construct
LSYVNWY

SEQ ID NO: 3412 - protein, 7 aa, synthetic construct
LTYVNWY

SEQ ID NO: 3413 - protein, 7 aa, synthetic construct
VTYLNWY

SEQ ID NO: 3414 - protein, 7 aa, synthetic construct
LSYVNWY

SEQ ID NO: 3415 - protein, 7 aa, synthetic construct
VSYVNWY

SEQ ID NO: 3416 - protein, 7 aa, synthetic construct
LSYVNWY

SEQ ID NO: 3417 - protein, 7 aa, synthetic construct
LSYLNWY

SEQ ID NO: 3418 - protein, 7 aa, synthetic construct
LSYLNWY

SEQ ID NO: 3419 - protein, 7 aa, synthetic construct
LSYVNWY

SEQ ID NO: 3420 - protein, 7 aa, synthetic construct
LSYVNWY

SEQ ID NO: 3421 - protein, 7 aa, synthetic construct
LSYVNWY

SEQ ID NO: 3422 - protein, 7 aa, synthetic construct
LTYVNWY

SEQ ID NO: 3423 - protein, 7 aa, synthetic construct
ISYVNWY

SEQ ID NO: 3424 - protein, 7 aa, synthetic construct
LSYVNWY

SEQ ID NO: 3425 - protein, 7 aa, synthetic construct
SSYLNWY

SEQ ID NO: 3426 - protein, 7 aa, synthetic construct
LSYLNWY

SEQ ID NO: 3427 - protein, 7 aa, synthetic construct
ITYLNWY

SEQ ID NO: 3428 - protein, 7 aa, synthetic construct
SSYLNWY

SEQ ID NO: 3429 - protein, 7 aa, synthetic construct
VTYVNWY

SEQ ID NO: 3430 - protein, 7 aa, synthetic construct
LTYLNWY

SEQ ID NO: 3431 - protein, 7 aa, synthetic construct
VSYLNWY

SEQ ID NO: 3432 - protein, 7 aa, synthetic construct
LTYVNWY

SEQ ID NO: 3433 - protein, 7 aa, synthetic construct
LSYVNWY

SEQ ID NO: 3434 - protein, 7 aa, synthetic construct
LSYVNWY

SEQ ID NO: 3435 - protein, 7 aa, synthetic construct
ISYVNWY

SEQ ID NO: 3436 - protein, 7 aa, synthetic construct
LTYVNWY

SEQ ID NO: 3437 - protein, 7 aa, synthetic construct
LTYVNWY

SEQ ID NO: 3438 - protein, 7 aa, synthetic construct
LTYVNWY

SEQ ID NO: 3439 - protein, 7 aa, synthetic construct
LTYVNWY

SEQ ID NO: 3440 - protein, 7 aa, synthetic construct
LTYVNWY

SEQ ID NO: 3441 - protein, 7 aa, synthetic construct
ISYVNWY

SEQ ID NO: 3442 - protein, 7 aa, synthetic construct
LTYVNWY

SEQ ID NO: 3443 - protein, 7 aa, synthetic construct
LSYLNWY

SEQ ID NO: 3444 - protein, 7 aa, synthetic construct
LTYLNWY

SEQ ID NO: 3445 - protein, 7 aa, synthetic construct
LTYLNWY

SEQ ID NO: 3446 - protein, 7 aa, synthetic construct
SSYLNWY

SEQ ID NO: 3447 - protein, 7 aa, synthetic construct
VSYLNWY

SEQ ID NO: 3448 - protein, 7 aa, synthetic construct
LTYLNWY

SEQ ID NO: 3449 - protein, 7 aa, synthetic construct
LTYLNWY

SEQ ID NO: 3450 - protein, 7 aa, synthetic construct
LTYVNWY

SEQ ID NO: 3451 - protein, 7 aa, synthetic construct
LRYLNWY

SEQ ID NO: 3452 - protein, 7 aa, synthetic construct
LRYLNWY

SEQ ID NO: 3453 - protein, 7 aa, synthetic construct
IRYLNWY

SEQ ID NO: 3454 - protein, 7 aa, synthetic construct
LTYLNWY

SEQ ID NO: 3455 - protein, 7 aa, synthetic construct
LTYLNWY

SEQ ID NO: 3456 - protein, 7 aa, synthetic construct
LSYLNWY

SEQ ID NO: 3457 - protein, 7 aa, synthetic construct
LTYLNWY

SEQ ID NO: 3458 - protein, 7 aa, synthetic construct
LTYLNWY

SEQ ID NO: 3459 - protein, 7 aa, synthetic construct
LSYLNWY

SEQ ID NO: 3460 - protein, 7 aa, synthetic construct
LSYLNWY

SEQ ID NO: 3461 - protein, 7 aa, synthetic construct
LTYVNWY

SEQ ID NO: 3462 - protein, 7 aa, synthetic construct
LSYLNWY

SEQ ID NO: 3463 - protein, 7 aa, synthetic construct
STYVNWY

SEQ ID NO: 3464 - protein, 7 aa, synthetic construct
LTYLNWY

SEQ ID NO: 3465 - protein, 7 aa, synthetic construct
SSYLNWY

SEQ ID NO: 3466 - protein, 7 aa, synthetic construct
VTYVNWY

SEQ ID NO: 3467 - protein, 7 aa, synthetic construct
LTYLNWY

SEQ ID NO: 3468 - protein, 7 aa, synthetic construct
LTYLNWY

SEQ ID NO: 3469 - protein, 7 aa, synthetic construct
LTYVNWY

SEQ ID NO: 3470 - protein, 7 aa, synthetic construct
VSYLNWY

SEQ ID NO: 3471 - protein, 7 aa, synthetic construct
LTYLNWY

SEQ ID NO: 3472 - protein, 7 aa, synthetic construct
LSYVNWY

SEQ ID NO: 3473 - protein, 7 aa, synthetic construct
VSYLNWY

SEQ ID NO: 3474 - protein, 7 aa, synthetic construct
ISYVNWY

SEQ ID NO: 3475 - protein, 7 aa, synthetic construct
ISYVNWY

SEQ ID NO: 3476 - protein, 7 aa, synthetic construct
LTYLNWY

SEQ ID NO: 3477 - protein, 7 aa, synthetic construct
LSYVNWY

SEQ ID NO: 3478 - protein, 7 aa, synthetic construct
LSYLNWY

SEQ ID NO: 3479 - protein, 7 aa, synthetic construct
LTYVNWY

SEQ ID NO: 3480 - protein, 7 aa, synthetic construct
LTYLNWY

SEQ ID NO: 3481 - protein, 7 aa, synthetic construct
VTYLNWY

SEQ ID NO: 3482 - protein, 7 aa, synthetic construct
LTYLNWY

SEQ ID NO: 3483 - protein, 7 aa, synthetic construct
LSYVNWY

SEQ ID NO: 3484 - protein, 7 aa, synthetic construct
LTYLNWY

SEQ ID NO: 3485 - protein, 7 aa, synthetic construct
LTYLNWY

SEQ ID NO: 3486 - protein, 7 aa, synthetic construct
LTYLNWY

SEQ ID NO: 3487 - protein, 7 aa, synthetic construct
LTYVNWY

SEQ ID NO: 3488 - protein, 7 aa, synthetic construct
LSYVNWY

SEQ ID NO: 3489 - protein, 7 aa, synthetic construct
VTYLNWY

SEQ ID NO: 3490 - protein, 7 aa, synthetic construct
VTYLNWY

SEQ ID NO: 3491 - protein, 7 aa, synthetic construct
VTYLNWY

SEQ ID NO: 3492 - protein, 7 aa, synthetic construct
ISYLNWY

SEQ ID NO: 3493 - protein, 7 aa, synthetic construct
LTYLNWY

SEQ ID NO: 3494 - protein, 7 aa, synthetic construct
LSYLNWY

SEQ ID NO: 3495 - protein, 7 aa, synthetic construct
LSYLNWY

SEQ ID NO: 3496 - protein, 7 aa, synthetic construct
VRYLNWY

SEQ ID NO: 3497 - protein, 7 aa, synthetic construct
VTYLNWY

SEQ ID NO: 3498 - protein, 7 aa, synthetic construct
LTYVNWY

SEQ ID NO: 3499 - protein, 7 aa, synthetic construct
LTYVNWY

SEQ ID NO: 3500 - protein, 7 aa, synthetic construct
LSYLNWY

SEQ ID NO: 3501 - protein, 7 aa, synthetic construct
VSYVNWY

SEQ ID NO: 3502 - protein, 7 aa, synthetic construct
VRYLNWY

SEQ ID NO: 3503 - protein, 7 aa, synthetic construct
VSYVNWY

SEQ ID NO: 3504 - protein, 7 aa, synthetic construct
LSYLNWY

SEQ ID NO: 3505 - protein, 7 aa, synthetic construct
LSYLNWY

SEQ ID NO: 3506 - protein, 7 aa, synthetic construct
LTYLNWY

SEQ ID NO: 3507 - protein, 7 aa, synthetic construct
LTYVNWY

SEQ ID NO: 3508 - protein, 7 aa, synthetic construct
LSYVNWY

SEQ ID NO: 3509 - protein, 7 aa, synthetic construct
ISYVNWY

SEQ ID NO: 3510 - protein, 7 aa, synthetic construct
LTYVNWY

SEQ ID NO: 3511 - protein, 7 aa, synthetic construct
LTYLNWY

SEQ ID NO: 3512 - protein, 7 aa, synthetic construct
LSYVNWY

SEQ ID NO: 3513 - protein, 7 aa, synthetic construct
SSYLNWY

SEQ ID NO: 3514 - protein, 7 aa, synthetic construct
LSYVNWY

SEQ ID NO: 3515 - protein, 7 aa, synthetic construct
LTYLNWY

SEQ ID NO: 3516 - protein, 7 aa, synthetic construct
LTYLNWY

SEQ ID NO: 3517 - protein, 7 aa, synthetic construct
LTYVNWY

SEQ ID NO: 3518 - protein, 7 aa, synthetic construct
LSYVNWY

SEQ ID NO: 3519 - protein, 7 aa, synthetic construct
LTYVNWY

SEQ ID NO: 3520 - protein, 7 aa, synthetic construct
VTYVNWY

SEQ ID NO: 3521 - protein, 7 aa, synthetic construct
LSYLNWY

SEQ ID NO: 3522 - protein, 7 aa, synthetic construct
VSYVNWY

SEQ ID NO: 3523 - protein, 7 aa, synthetic construct
LSYLNWY

SEQ ID NO: 3524 - protein, 7 aa, synthetic construct
ISYVNWY

SEQ ID NO: 3525 - protein, 7 aa, synthetic construct
LTYLNWY

SEQ ID NO: 3526 - protein, 7 aa, synthetic construct
LTYLNWY

SEQ ID NO: 3527 - protein, 7 aa, synthetic construct
VSYVNWY

SEQ ID NO: 3528 - protein, 7 aa, synthetic construct
LTYLNWY

SEQ ID NO: 3529 - protein, 7 aa, synthetic construct
LTYLNWY

SEQ ID NO: 3530 - protein, 7 aa, synthetic construct
LSYLNWY

SEQ ID NO: 3531 - protein, 7 aa, synthetic construct
ITYVNWY

SEQ ID NO: 3532 - protein, 7 aa, synthetic construct
LTYLNWY

SEQ ID NO: 3533 - protein, 7 aa, synthetic construct
ISYLNWY

SEQ ID NO: 3534 - protein, 7 aa, synthetic construct
LSYLNWY

SEQ ID NO: 3535 - protein, 7 aa, synthetic construct
VSYLNWY

SEQ ID NO: 3536 - protein, 7 aa, synthetic construct
LTYVNWY

SEQ ID NO: 3537 - protein, 7 aa, synthetic construct
VSYVNWY

SEQ ID NO: 3538 - protein, 7 aa, synthetic construct
VTYLNWY

SEQ ID NO: 3539 - protein, 7 aa, synthetic construct
LSYVNWY

SEQ ID NO: 3540 - protein, 7 aa, synthetic construct
LTYLNWY

SEQ ID NO: 3541 - protein, 7 aa, synthetic construct
LTYVNWY

SEQ ID NO: 3542 - protein, 7 aa, synthetic construct
VTYVNWY

SEQ ID NO: 3543 - protein, 7 aa, synthetic construct
ISYLNWY

SEQ ID NO: 3544 - protein, 7 aa, synthetic construct
LTYLNWY

SEQ ID NO: 3545 - protein, 7 aa, synthetic construct
LTYVNWY

SEQ ID NO: 3546 - protein, 7 aa, synthetic construct
LTYVNWY

SEQ ID NO: 3547 - protein, 7 aa, synthetic construct
LTYVNWY

SEQ ID NO: 3548 - protein, 7 aa, synthetic construct
SSYLNWY

SEQ ID NO: 3549 - protein, 7 aa, synthetic construct
LSYLNWY

SEQ ID NO: 3550 - protein, 7 aa, synthetic construct
VTYLNWY

SEQ ID NO: 3551 - protein, 7 aa, synthetic construct
LSYLNWY

SEQ ID NO: 3552 - protein, 7 aa, synthetic construct
LTYVNWY

SEQ ID NO: 3553 - protein, 7 aa, synthetic construct
LTYLNWY

SEQ ID NO: 3554 - protein, 7 aa, synthetic construct
LSYVNWY

SEQ ID NO: 3555 - protein, 7 aa, synthetic construct
VTYLNWY

SEQ ID NO: 3556 - protein, 7 aa, synthetic construct
LTYVNWY

SEQ ID NO: 3557 - protein, 7 aa, synthetic construct
LTYVNWY

SEQ ID NO: 3558 - protein, 7 aa, synthetic construct
VTYLNWY

SEQ ID NO: 3559 - protein, 7 aa, synthetic construct
LSYLNWY

SEQ ID NO: 3560 - protein, 7 aa, synthetic construct
VSYVNWY

SEQ ID NO: 3561 - protein, 7 aa, synthetic construct
STYLNWY

SEQ ID NO: 3562 - protein, 7 aa, synthetic construct
VSYVNWY

SEQ ID NO: 3563 - protein, 7 aa, synthetic construct
LTYVNWY

SEQ ID NO: 3564 - protein, 7 aa, synthetic construct
LSYLNWY

SEQ ID NO: 3565 - protein, 7 aa, synthetic construct
LSYVNWY

SEQ ID NO: 3566 - protein, 7 aa, synthetic construct
VSYVNWY

SEQ ID NO: 3567 - protein, 7 aa, synthetic construct
VSYVNWY

SEQ ID NO: 3568 - protein, 7 aa, synthetic construct
SSYLNWY

SEQ ID NO: 3569 - protein, 7 aa, synthetic construct
VTYLNWY

SEQ ID NO: 3570 - protein, 7 aa, synthetic construct
SSYLNWY

SEQ ID NO: 3571 - protein, 7 aa, synthetic construct
VSYLNWY

SEQ ID NO: 3572 - protein, 7 aa, synthetic construct
SSYVNWY

SEQ ID NO: 3573 - protein, 10 aa, synthetic construct
LLIYAATSRA

SEQ ID NO: 3574 - protein, 10 aa, synthetic construct
LLIYAATSLA

SEQ ID NO: 3575 - protein, 10 aa, synthetic construct
LLIYAATSRA

SEQ ID NO: 3576 - protein, 10 aa, synthetic construct
LVIYAATSRA

SEQ ID NO: 3577 - protein, 10 aa, synthetic construct
LVIYAATSRA

SEQ ID NO: 3578 - protein, 10 aa, synthetic construct
LVIYAATSRA

SEQ ID NO: 3579 - protein, 10 aa, synthetic construct
LVIYATTSRA

SEQ ID NO: 3580 - protein, 10 aa, synthetic construct
LVIYATTSRA

SEQ ID NO: 3581 - protein, 10 aa, synthetic construct
LVIYAATSLA

SEQ ID NO: 3582 - protein, 10 aa, synthetic construct
LLIYAATSLH

SEQ ID NO: 3583 - protein, 10 aa, synthetic construct
LLIYAATSRA

SEQ ID NO: 3584 - protein, 10 aa, synthetic construct
LLIYAATSRA

SEQ ID NO: 3585 - protein, 10 aa, synthetic construct
LLIYAVTSRA

SEQ ID NO: 3586 - protein, 10 aa, synthetic construct
LVIYYVSNRA

SEQ ID NO: 3587 - protein, 10 aa, synthetic construct
LVIYYVSNRA

SEQ ID NO: 3588 - protein, 10 aa, synthetic construct
LVIYAATSRA

SEQ ID NO: 3589 - protein, 10 aa, synthetic construct
LVIYAATSRA

SEQ ID NO: 3590 - protein, 10 aa, synthetic construct
LVIYAATSRA

SEQ ID NO: 3591 - protein, 10 aa, synthetic construct
LVIYAATSRH

SEQ ID NO: 3592 - protein, 10 aa, synthetic construct
LLIYAASSLQ

SEQ ID NO: 3593 - protein, 10 aa, synthetic construct
LVIYAATSRA

SEQ ID NO: 3594 - protein, 10 aa, synthetic construct
LLIYAASSLQ

SEQ ID NO: 3595 - protein, 10 aa, synthetic construct
LLIYAASSLQ

SEQ ID NO: 3596 - protein, 10 aa, synthetic construct
LLIYAASSLQ

SEQ ID NO: 3597 - protein, 10 aa, synthetic construct
LLIYAASSLQ

SEQ ID NO: 3598 - protein, 10 aa, synthetic construct
LLIYAATSRA

SEQ ID NO: 3599 - protein, 10 aa, synthetic construct
LVIYAATSRA

SEQ ID NO: 3600 - protein, 10 aa, synthetic construct
LLIYAATSRA

SEQ ID NO: 3601 - protein, 10 aa, synthetic construct
LVIYAATSRA

SEQ ID NO: 3602 - protein, 10 aa, synthetic construct
LLIYAATSRA

SEQ ID NO: 3603 - protein, 10 aa, synthetic construct
LVIYAATSRH

SEQ ID NO: 3604 - protein, 10 aa, synthetic construct
LLIYAATSRH

SEQ ID NO: 3605 - protein, 10 aa, synthetic construct
LVIYAATSRA

SEQ ID NO: 3606 - protein, 10 aa, synthetic construct
LLIYAATSRA

SEQ ID NO: 3607 - protein, 10 aa, synthetic construct
LLIYAATSRA

SEQ ID NO: 3608 - protein, 10 aa, synthetic construct
LLIYAATSLH

SEQ ID NO: 3609 - protein, 10 aa, synthetic construct
LVIYATTSLA

SEQ ID NO: 3610 - protein, 10 aa, synthetic construct
LLIYAATSLA

SEQ ID NO: 3611 - protein, 10 aa, synthetic construct
LVIYAATSRA

SEQ ID NO: 3612 - protein, 10 aa, synthetic construct
LLIYAATSLA

SEQ ID NO: 3613 - protein, 10 aa, synthetic construct
LVIYAATSRA

SEQ ID NO: 3614 - protein, 10 aa, synthetic construct
LLIYAATSLA

SEQ ID NO: 3615 - protein, 10 aa, synthetic construct
LLIYAATSLA

SEQ ID NO: 3616 - protein, 10 aa, synthetic construct
LLIYAATSRA

SEQ ID NO: 3617 - protein, 10 aa, synthetic construct
LLIYAATSRA

SEQ ID NO: 3618 - protein, 10 aa, synthetic construct
LLIYAATSRA

SEQ ID NO: 3619 - protein, 10 aa, synthetic construct
LLIYAASSLQ

SEQ ID NO: 3620 - protein, 10 aa, synthetic construct
LLIYAATSLH

SEQ ID NO: 3621 - protein, 10 aa, synthetic construct
LLIYAATSLH

SEQ ID NO: 3622 - protein, 10 aa, synthetic construct
LVIYAATSRA

SEQ ID NO: 3623 - protein, 10 aa, synthetic construct
LVIYAATSRA

SEQ ID NO: 3624 - protein, 10 aa, synthetic construct
LVIYAATSRA

SEQ ID NO: 3625 - protein, 10 aa, synthetic construct
LLIYATTSLA

SEQ ID NO: 3626 - protein, 10 aa, synthetic construct
LVIYAATSLA

SEQ ID NO: 3627 - protein, 10 aa, synthetic construct
LLIYAASSLQ

SEQ ID NO: 3628 - protein, 10 aa, synthetic construct
LLIYAATSRH

SEQ ID NO: 3629 - protein, 10 aa, synthetic construct
LLIYAATSRA

SEQ ID NO: 3630 - protein, 10 aa, synthetic construct
LVIYAATSLA

SEQ ID NO: 3631 - protein, 10 aa, synthetic construct
LVIYAATSLA

SEQ ID NO: 3632 - protein, 10 aa, synthetic construct
LLIYAVTSLA

SEQ ID NO: 3633 - protein, 10 aa, synthetic construct
LVIYAVTSLA

SEQ ID NO: 3634 - protein, 10 aa, synthetic construct
LLIYAASSLQ

SEQ ID NO: 3635 - protein, 10 aa, synthetic construct
LVIYAATSLA

SEQ ID NO: 3636 - protein, 10 aa, synthetic construct
LLIYAATSRA

SEQ ID NO: 3637 - protein, 10 aa, synthetic construct
LLIYAATSRA

SEQ ID NO: 3638 - protein, 10 aa, synthetic construct
LLIYAATSRA

SEQ ID NO: 3639 - protein, 10 aa, synthetic construct
LLIYAATSRA

SEQ ID NO: 3640 - protein, 10 aa, synthetic construct
LLIYAATSRA

SEQ ID NO: 3641 - protein, 10 aa, synthetic construct
LLIYAATSRH

SEQ ID NO: 3642 - protein, 10 aa, synthetic construct
LVIYAATSRA

SEQ ID NO: 3643 - protein, 10 aa, synthetic construct
LLIYAATSRH

SEQ ID NO: 3644 - protein, 10 aa, synthetic construct
LLIYAATSRH

SEQ ID NO: 3645 - protein, 10 aa, synthetic construct
LVIYAATSLA

SEQ ID NO: 3646 - protein, 10 aa, synthetic construct
LVIYAATSRA

SEQ ID NO: 3647 - protein, 10 aa, synthetic construct
LLIYAATSRA

SEQ ID NO: 3648 - protein, 10 aa, synthetic construct
LLIYAATSRH

SEQ ID NO: 3649 - protein, 10 aa, synthetic construct
LLIYAATSLH

SEQ ID NO: 3650 - protein, 10 aa, synthetic construct
LLIYAATSPA

SEQ ID NO: 3651 - protein, 10 aa, synthetic construct
LLIYAATSRA

SEQ ID NO: 3652 - protein, 10 aa, synthetic construct
LLIYAATSLA

SEQ ID NO: 3653 - protein, 10 aa, synthetic construct
LLIYAATSRA

SEQ ID NO: 3654 - protein, 10 aa, synthetic construct
LLIYAATSLA

SEQ ID NO: 3655 - protein, 10 aa, synthetic construct
LVIYAATSLA

SEQ ID NO: 3656 - protein, 10 aa, synthetic construct
LVIYAATSRA

SEQ ID NO: 3657 - protein, 10 aa, synthetic construct
LLIYATTSLA

SEQ ID NO: 3658 - protein, 10 aa, synthetic construct
LLIYAATSRA

SEQ ID NO: 3659 - protein, 10 aa, synthetic construct
LVIYAATSLA

SEQ ID NO: 3660 - protein, 10 aa, synthetic construct
LVIYAATSLA

SEQ ID NO: 3661 - protein, 10 aa, synthetic construct
LLIYAVTSLA

SEQ ID NO: 3662 - protein, 10 aa, synthetic construct
LLIYAATSRH

SEQ ID NO: 3663 - protein, 10 aa, synthetic construct
LLIYAATSRA

SEQ ID NO: 3664 - protein, 10 aa, synthetic construct
LLIYAASSLQ

SEQ ID NO: 3665 - protein, 10 aa, synthetic construct
LLIYAASSLQ

SEQ ID NO: 3666 - protein, 10 aa, synthetic construct
LVIYAATSRA

SEQ ID NO: 3667 - protein, 10 aa, synthetic construct
LLIYAASSLQ

SEQ ID NO: 3668 - protein, 10 aa, synthetic construct
LLIYATTSLA

SEQ ID NO: 3669 - protein, 10 aa, synthetic construct
LVIYAATSRA

SEQ ID NO: 3670 - protein, 10 aa, synthetic construct
LLIYAATSRA

SEQ ID NO: 3671 - protein, 10 aa, synthetic construct
LVIYAATSLA

SEQ ID NO: 3672 - protein, 10 aa, synthetic construct
LVIYAATSRA

SEQ ID NO: 3673 - protein, 10 aa, synthetic construct
LLIYAATSRH

SEQ ID NO: 3674 - protein, 10 aa, synthetic construct
LLIYAATSLH

SEQ ID NO: 3675 - protein, 10 aa, synthetic construct
LLIYAATSRA

SEQ ID NO: 3676 - protein, 10 aa, synthetic construct
LVIYAAPSLA

SEQ ID NO: 3677 - protein, 10 aa, synthetic construct
LVIYATTSLA

SEQ ID NO: 3678 - protein, 10 aa, synthetic construct
LLIYAATSRH

SEQ ID NO: 3679 - protein, 10 aa, synthetic construct
LVIYAATSLA

SEQ ID NO: 3680 - protein, 10 aa, synthetic construct
LLIYAATSRA

SEQ ID NO: 3681 - protein, 10 aa, synthetic construct
LLIYAATSRH

SEQ ID NO: 3682 - protein, 10 aa, synthetic construct
LLIYAASSLQ

SEQ ID NO: 3683 - protein, 10 aa, synthetic construct
LVIYAVTSRA

SEQ ID NO: 3684 - protein, 10 aa, synthetic construct
LLIYAATSRA

SEQ ID NO: 3685 - protein, 10 aa, synthetic construct
LLIYAATSRH

SEQ ID NO: 3686 - protein, 10 aa, synthetic construct
LVIYAATSRA

SEQ ID NO: 3687 - protein, 10 aa, synthetic construct
LVIYAATSRA

SEQ ID NO: 3688 - protein, 10 aa, synthetic construct
LVIYAATSRA

SEQ ID NO: 3689 - protein, 10 aa, synthetic construct
LVIYAATSLA

SEQ ID NO: 3690 - protein, 10 aa, synthetic construct
LLIYAVTSRA

SEQ ID NO: 3691 - protein, 10 aa, synthetic construct
LLIYAVTSRA

SEQ ID NO: 3692 - protein, 10 aa, synthetic construct
LLIYAATSRH

SEQ ID NO: 3693 - protein, 10 aa, synthetic construct
LVIYAATSLA

SEQ ID NO: 3694 - protein, 10 aa, synthetic construct
LLIYAASSLQ

SEQ ID NO: 3695 - protein, 10 aa, synthetic construct
LVIYAATSRH

SEQ ID NO: 3696 - protein, 10 aa, synthetic construct
LVIYAATSLA

SEQ ID NO: 3697 - protein, 10 aa, synthetic construct
LVIYAATSLA

SEQ ID NO: 3698 - protein, 10 aa, synthetic construct
LLIYAATSRH

SEQ ID NO: 3699 - protein, 10 aa, synthetic construct
LLIYAATSRA

SEQ ID NO: 3700 - protein, 10 aa, synthetic construct
LLIYAATSLA

SEQ ID NO: 3701 - protein, 10 aa, synthetic construct
LVIYAATSRH

SEQ ID NO: 3702 - protein, 10 aa, synthetic construct
LLIYAATSRA

SEQ ID NO: 3703 - protein, 10 aa, synthetic construct
LVIYAATSRA

SEQ ID NO: 3704 - protein, 10 aa, synthetic construct
LLIYAATSRA

SEQ ID NO: 3705 - protein, 10 aa, synthetic construct
LLIYAATSLH

SEQ ID NO: 3706 - protein, 10 aa, synthetic construct
LLIYAATSRA

SEQ ID NO: 3707 - protein, 10 aa, synthetic construct
LLIYAATSRA

SEQ ID NO: 3708 - protein, 10 aa, synthetic construct
LLIYAATSLA

SEQ ID NO: 3709 - protein, 10 aa, synthetic construct
LVIYAATSLA

SEQ ID NO: 3710 - protein, 10 aa, synthetic construct
LLIYAATSRA

SEQ ID NO: 3711 - protein, 10 aa, synthetic construct
LLIYAATSRA

SEQ ID NO: 3712 - protein, 10 aa, synthetic construct
LLIYAATSRA

SEQ ID NO: 3713 - protein, 10 aa, synthetic construct
LLIYAATSRA

SEQ ID NO: 3714 - protein, 10 aa, synthetic construct
LLIYAATSRA

SEQ ID NO: 3715 - protein, 10 aa, synthetic construct
LLIYAATSRA

SEQ ID NO: 3716 - protein, 10 aa, synthetic construct
LLIYAATSRA

SEQ ID NO: 3717 - protein, 10 aa, synthetic construct
LLIYAASSLQ

SEQ ID NO: 3718 - protein, 10 aa, synthetic construct
LVIYAATSRA

SEQ ID NO: 3719 - protein, 10 aa, synthetic construct
LVIYAVTSLH

SEQ ID NO: 3720 - protein, 10 aa, synthetic construct
LLIYAATSLA

SEQ ID NO: 3721 - protein, 10 aa, synthetic construct
LVIYAATSLA

SEQ ID NO: 3722 - protein, 10 aa, synthetic construct
LLIYAATSRA

SEQ ID NO: 3723 - protein, 10 aa, synthetic construct
LVIYAATSLA

SEQ ID NO: 3724 - protein, 10 aa, synthetic construct
LLIYAATSLA

SEQ ID NO: 3725 - protein, 10 aa, synthetic construct
LLIYATTSRH

SEQ ID NO: 3726 - protein, 10 aa, synthetic construct
LVIYAATSLA

SEQ ID NO: 3727 - protein, 10 aa, synthetic construct
LVIYAATSRH

SEQ ID NO: 3728 - protein, 10 aa, synthetic construct
LLIYAATSRH

SEQ ID NO: 3729 - protein, 10 aa, synthetic construct
LLIYAATSRH

SEQ ID NO: 3730 - protein, 10 aa, synthetic construct
LLIYAATSLA

SEQ ID NO: 3731 - protein, 10 aa, synthetic construct
LVIYAATSRA

SEQ ID NO: 3732 - protein, 10 aa, synthetic construct
LLIYAATSRH

SEQ ID NO: 3733 - protein, 10 aa, synthetic construct
LLIYAATSRA

SEQ ID NO: 3734 - protein, 10 aa, synthetic construct
LLIYAATSLA

SEQ ID NO: 3735 - protein, 10 aa, synthetic construct
LVIYAVTSLA

SEQ ID NO: 3736 - protein, 10 aa, synthetic construct
LLIYAATSRH

SEQ ID NO: 3737 - protein, 10 aa, synthetic construct
LLIYAASSLQ

SEQ ID NO: 3738 - protein, 10 aa, synthetic construct
LVIYAATSRA

SEQ ID NO: 3739 - protein, 10 aa, synthetic construct
LLIYAASSLQ

SEQ ID NO: 3740 - protein, 10 aa, synthetic construct
LVIYAATSRA

SEQ ID NO: 3741 - protein, 10 aa, synthetic construct
LLIYAATSRA

SEQ ID NO: 3742 - protein, 8 aa, synthetic construct
QQSYENPL

SEQ ID NO: 3743 - protein, 8 aa, synthetic construct
QQSDESPL

SEQ ID NO: 3744 - protein, 8 aa, synthetic construct
QQSYDSPL

SEQ ID NO: 3745 - protein, 8 aa, synthetic construct
QQSYDSPL

SEQ ID NO: 3746 - protein, 8 aa, synthetic construct
QQSYDSPL

SEQ ID NO: 3747 - protein, 8 aa, synthetic construct
QQSYSNPL

SEQ ID NO: 3748 - protein, 8 aa, synthetic construct
QQSYENPL

SEQ ID NO: 3749 - protein, 8 aa, synthetic construct
QQSYENPL

SEQ ID NO: 3750 - protein, 8 aa, synthetic construct
QQSYNTPL

SEQ ID NO: 3751 - protein, 8 aa, synthetic construct
QQSDSLPL

SEQ ID NO: 3752 - protein, 8 aa, synthetic construct
QQSYSSPL

SEQ ID NO: 3753 - protein, 8 aa, synthetic construct
QQSYDTPL

SEQ ID NO: 3754 - protein, 8 aa, synthetic construct
QQSYDSPL

SEQ ID NO: 3755 - protein, 8 aa, synthetic construct
QQSYDNPL

SEQ ID NO: 3756 - protein, 8 aa, synthetic construct
QQSYDNPL

SEQ ID NO: 3757 - protein, 8 aa, synthetic construct
QQSYDLPL

SEQ ID NO: 3758 - protein, 8 aa, synthetic construct
QQSYDLPL

SEQ ID NO: 3759 - protein, 8 aa, synthetic construct
QQSYDLPL

SEQ ID NO: 3760 - protein, 8 aa, synthetic construct
QQSYDTPL

SEQ ID NO: 3761 - protein, 8 aa, synthetic construct
QQSYSTPL

SEQ ID NO: 3762 - protein, 8 aa, synthetic construct
QQSYESPL

SEQ ID NO: 3763 - protein, 8 aa, synthetic construct
QQSYSTPL

SEQ ID NO: 3764 - protein, 8 aa, synthetic construct
QQSYSTPL

SEQ ID NO: 3765 - protein, 8 aa, synthetic construct
QQSYSTPL

SEQ ID NO: 3766 - protein, 8 aa, synthetic construct
QQSYSTPL

SEQ ID NO: 3767 - protein, 8 aa, synthetic construct
QQSYDTPL

SEQ ID NO: 3768 - protein, 8 aa, synthetic construct
QQSYDTPL

SEQ ID NO: 3769 - protein, 8 aa, synthetic construct
QQSYENPL

SEQ ID NO: 3770 - protein, 8 aa, synthetic construct
QQSYESPL

SEQ ID NO: 3771 - protein, 8 aa, synthetic construct
QQSYSLPL

SEQ ID NO: 3772 - protein, 8 aa, synthetic construct
QQSYDTPL

SEQ ID NO: 3773 - protein, 8 aa, synthetic construct
QQSYNLPL

SEQ ID NO: 3774 - protein, 8 aa, synthetic construct
QQSYNLPL

SEQ ID NO: 3775 - protein, 8 aa, synthetic construct
QQSYNSPL

SEQ ID NO: 3776 - protein, 8 aa, synthetic construct
QQSYNSPL

SEQ ID NO: 3777 - protein, 8 aa, synthetic construct
QQSYNTPL

SEQ ID NO: 3778 - protein, 8 aa, synthetic construct
QQSYSTPL

SEQ ID NO: 3779 - protein, 8 aa, synthetic construct
QQSYDLPL

SEQ ID NO: 3780 - protein, 8 aa, synthetic construct
QQSYDNPL

SEQ ID NO: 3781 - protein, 8 aa, synthetic construct
QQSYELPL

SEQ ID NO: 3782 - protein, 8 aa, synthetic construct
QQSYELPL

SEQ ID NO: 3783 - protein, 8 aa, synthetic construct
QQSYDTPL

SEQ ID NO: 3784 - protein, 8 aa, synthetic construct
QQSYSNPL

SEQ ID NO: 3785 - protein, 8 aa, synthetic construct
QQSYNLPL

SEQ ID NO: 3786 - protein, 8 aa, synthetic construct
QQSYDLPL

SEQ ID NO: 3787 - protein, 8 aa, synthetic construct
QQSYESPL

SEQ ID NO: 3788 - protein, 8 aa, synthetic construct
QQSYSTPL

SEQ ID NO: 3789 - protein, 8 aa, synthetic construct
QQSYDNPL

SEQ ID NO: 3790 - protein, 8 aa, synthetic construct
QQSYDNPL

SEQ ID NO: 3791 - protein, 8 aa, synthetic construct
QQSYDNPL

SEQ ID NO: 3792 - protein, 8 aa, synthetic construct
QQSYDNPL

SEQ ID NO: 3793 - protein, 8 aa, synthetic construct
QQSYELPL

SEQ ID NO: 3794 - protein, 8 aa, synthetic construct
QQSYDNPL

SEQ ID NO: 3795 - protein, 8 aa, synthetic construct
QQSYDNPL

SEQ ID NO: 3796 - protein, 8 aa, synthetic construct
QQSYELPL

SEQ ID NO: 3797 - protein, 8 aa, synthetic construct
QQSYENPL

SEQ ID NO: 3798 - protein, 8 aa, synthetic construct
QQSYELPL

SEQ ID NO: 3799 - protein, 8 aa, synthetic construct
QQSYNTPL

SEQ ID NO: 3800 - protein, 8 aa, synthetic construct
QQSYDLPL

SEQ ID NO: 3801 - protein, 8 aa, synthetic construct
QQSYDSPL

SEQ ID NO: 3802 - protein, 8 aa, synthetic construct
QQSYDSPL

SEQ ID NO: 3803 - protein, 8 aa, synthetic construct
QQSYSTPL

SEQ ID NO: 3804 - protein, 8 aa, synthetic construct
QQSYNLPL

SEQ ID NO: 3805 - protein, 8 aa, synthetic construct
QQSYDNPL

SEQ ID NO: 3806 - protein, 8 aa, synthetic construct
QQSYDNPL

SEQ ID NO: 3807 - protein, 8 aa, synthetic construct
QQSYDNPL

SEQ ID NO: 3808 - protein, 8 aa, synthetic construct
QQSYDNPL

SEQ ID NO: 3809 - protein, 8 aa, synthetic construct
QQSYDLPL

SEQ ID NO: 3810 - protein, 8 aa, synthetic construct
QQSYSLPL

SEQ ID NO: 3811 - protein, 8 aa, synthetic construct
QQSYDTPL

SEQ ID NO: 3812 - protein, 8 aa, synthetic construct
QQSYELPL

SEQ ID NO: 3813 - protein, 8 aa, synthetic construct
QQSYESPL

SEQ ID NO: 3814 - protein, 8 aa, synthetic construct
QQSYENPL

SEQ ID NO: 3815 - protein, 8 aa, synthetic construct
QQSYSSPL

SEQ ID NO: 3816 - protein, 8 aa, synthetic construct
QQSYDNPL

SEQ ID NO: 3817 - protein, 8 aa, synthetic construct
QQSYDSPL

SEQ ID NO: 3818 - protein, 8 aa, synthetic construct
QQSYDLPL

SEQ ID NO: 3819 - protein, 8 aa, synthetic construct
QQSYELPL

SEQ ID NO: 3820 - protein, 8 aa, synthetic construct
QQSYDLPL

SEQ ID NO: 3821 - protein, 8 aa, synthetic construct
QQSYDLPL

SEQ ID NO: 3822 - protein, 8 aa, synthetic construct
QQSYENPL

SEQ ID NO: 3823 - protein, 8 aa, synthetic construct
QQSYSSPL

SEQ ID NO: 3824 - protein, 8 aa, synthetic construct
QQSDELPL

SEQ ID NO: 3825 - protein, 8 aa, synthetic construct
QQSYENPL

SEQ ID NO: 3826 - protein, 8 aa, synthetic construct
QQSYDLPL

SEQ ID NO: 3827 - protein, 8 aa, synthetic construct
QQSYESPL

SEQ ID NO: 3828 - protein, 8 aa, synthetic construct
QQSYDLPL

SEQ ID NO: 3829 - protein, 8 aa, synthetic construct
QQSYDLPL

SEQ ID NO: 3830 - protein, 8 aa, synthetic construct
QQSYENPL

SEQ ID NO: 3831 - protein, 8 aa, synthetic construct
QQSYETPL

SEQ ID NO: 3832 - protein, 8 aa, synthetic construct
QQSYENPL

SEQ ID NO: 3833 - protein, 8 aa, synthetic construct
QQSYENPL

SEQ ID NO: 3834 - protein, 8 aa, synthetic construct
QQSYSTPL

SEQ ID NO: 3835 - protein, 8 aa, synthetic construct
QQSYDSPL

SEQ ID NO: 3836 - protein, 8 aa, synthetic construct
QQSYDNPL

SEQ ID NO: 3837 - protein, 8 aa, synthetic construct
QQSYDSPL

SEQ ID NO: 3838 - protein, 8 aa, synthetic construct
QQSYNLPL

SEQ ID NO: 3839 - protein, 8 aa, synthetic construct
QQSYDTPL

SEQ ID NO: 3840 - protein, 8 aa, synthetic construct
QQSYELPL

SEQ ID NO: 3841 - protein, 8 aa, synthetic construct
QQSYDLPL

SEQ ID NO: 3842 - protein, 8 aa, synthetic construct
QQSYDSPL

SEQ ID NO: 3843 - protein, 8 aa, synthetic construct
QQSYENPL

SEQ ID NO: 3844 - protein, 8 aa, synthetic construct
QQSYETPL

SEQ ID NO: 3845 - protein, 8 aa, synthetic construct
  VARIANT 5: note = any amino acid
QQSYXTPL

SEQ ID NO: 3846 - protein, 8 aa, synthetic construct
QQSYNSPL

SEQ ID NO: 3847 - protein, 8 aa, synthetic construct
QQSYDNPL

SEQ ID NO: 3848 - protein, 8 aa, synthetic construct
QQSYELPL

SEQ ID NO: 3849 - protein, 8 aa, synthetic construct
QQSYNSPL

SEQ ID NO: 3850 - protein, 8 aa, synthetic construct
QQSYDLPL

SEQ ID NO: 3851 - protein, 8 aa, synthetic construct
QQSYNSPL

SEQ ID NO: 3852 - protein, 8 aa, synthetic construct
QQSYELPL

SEQ ID NO: 3853 - protein, 8 aa, synthetic construct
QQSYDTPL

SEQ ID NO: 3854 - protein, 8 aa, synthetic construct
QQSYDTPL

SEQ ID NO: 3855 - protein, 8 aa, synthetic construct
QQSYESPL

SEQ ID NO: 3856 - protein, 8 aa, synthetic construct
QQSYSLPL

SEQ ID NO: 3857 - protein, 8 aa, synthetic construct
QQSYDLPL

SEQ ID NO: 3858 - protein, 8 aa, synthetic construct
QQSYNLPL

SEQ ID NO: 3859 - protein, 8 aa, synthetic construct
QQSYNNPL

SEQ ID NO: 3860 - protein, 8 aa, synthetic construct
QQSYESPL

SEQ ID NO: 3861 - protein, 8 aa, synthetic construct
QQSYDLPL

SEQ ID NO: 3862 - protein, 8 aa, synthetic construct
QQSYDLPL

SEQ ID NO: 3863 - protein, 8 aa, synthetic construct
QQSYDTPL

SEQ ID NO: 3864 - protein, 8 aa, synthetic construct
QQSYENPL

SEQ ID NO: 3865 - protein, 8 aa, synthetic construct
QQSYSTPL

SEQ ID NO: 3866 - protein, 8 aa, synthetic construct
QQSDETPL

SEQ ID NO: 3867 - protein, 8 aa, synthetic construct
QQSDSLPL

SEQ ID NO: 3868 - protein, 8 aa, synthetic construct
QQSYENPL

SEQ ID NO: 3869 - protein, 8 aa, synthetic construct
QQSYNLPL

SEQ ID NO: 3870 - protein, 8 aa, synthetic construct
QQSYSNPL

SEQ ID NO: 3871 - protein, 8 aa, synthetic construct
QQSNNLPL

SEQ ID NO: 3872 - protein, 8 aa, synthetic construct
QQSYSNPL

SEQ ID NO: 3873 - protein, 8 aa, synthetic construct
QQSYSTPL

SEQ ID NO: 3874 - protein, 8 aa, synthetic construct
QQSDERPL

SEQ ID NO: 3875 - protein, 8 aa, synthetic construct
QQSYDLPL

SEQ ID NO: 3876 - protein, 8 aa, synthetic construct
QQSYDLPL

SEQ ID NO: 3877 - protein, 8 aa, synthetic construct
QQSYDLPL

SEQ ID NO: 3878 - protein, 8 aa, synthetic construct
QQSYENPL

SEQ ID NO: 3879 - protein, 8 aa, synthetic construct
QQSDNLPL

SEQ ID NO: 3880 - protein, 8 aa, synthetic construct
QQSYENPL

SEQ ID NO: 3881 - protein, 8 aa, synthetic construct
QQSDELPL

SEQ ID NO: 3882 - protein, 8 aa, synthetic construct
QQSYDNPL

SEQ ID NO: 3883 - protein, 8 aa, synthetic construct
QQSYNSPL

SEQ ID NO: 3884 - protein, 8 aa, synthetic construct
QQSYSLPL

SEQ ID NO: 3885 - protein, 8 aa, synthetic construct
QQSYNSPL

SEQ ID NO: 3886 - protein, 8 aa, synthetic construct
QQSYSTPL

SEQ ID NO: 3887 - protein, 8 aa, synthetic construct
QQSYDLPL

SEQ ID NO: 3888 - protein, 8 aa, synthetic construct
QQSYELPL

SEQ ID NO: 3889 - protein, 8 aa, synthetic construct
QQSYDLPL

SEQ ID NO: 3890 - protein, 8 aa, synthetic construct
QQSYDTPL

SEQ ID NO: 3891 - protein, 8 aa, synthetic construct
QQSYETPL

SEQ ID NO: 3892 - protein, 8 aa, synthetic construct
QQSYESPL

SEQ ID NO: 3893 - protein, 8 aa, synthetic construct
QQSYDLPL

SEQ ID NO: 3894 - protein, 8 aa, synthetic construct
QQSYNLPL

SEQ ID NO: 3895 - protein, 8 aa, synthetic construct
QQSYNSPL

SEQ ID NO: 3896 - protein, 8 aa, synthetic construct
QQSYDTPL

SEQ ID NO: 3897 - protein, 8 aa, synthetic construct
QQSYDLPL

SEQ ID NO: 3898 - protein, 8 aa, synthetic construct
QQSYDTPL

SEQ ID NO: 3899 - protein, 8 aa, synthetic construct
QQSYSNPL

SEQ ID NO: 3900 - protein, 8 aa, synthetic construct
QQSYDTPL

SEQ ID NO: 3901 - protein, 8 aa, synthetic construct
QQSDNNPL

SEQ ID NO: 3902 - protein, 8 aa, synthetic construct
QQSYDLPL

SEQ ID NO: 3903 - protein, 8 aa, synthetic construct
QQSYDTPL

SEQ ID NO: 3904 - protein, 8 aa, synthetic construct
QQSYETPL

SEQ ID NO: 3905 - protein, 8 aa, synthetic construct
QQSYNNPL

SEQ ID NO: 3906 - protein, 8 aa, synthetic construct
QQSYSTPL

SEQ ID NO: 3907 - protein, 8 aa, synthetic construct
QQSYDLPL

SEQ ID NO: 3908 - protein, 8 aa, synthetic construct
QQSYSTPL

SEQ ID NO: 3909 - protein, 8 aa, synthetic construct
QQSYDNPL

SEQ ID NO: 3910 - protein, 8 aa, synthetic construct
QQSYSTPL

SEQ ID NO: 3911 - protein, 6 aa, synthetic construct
SDYSMN

SEQ ID NO: 3912 - protein, 6 aa, synthetic construct
DSYSMN

SEQ ID NO: 3913 - protein, 6 aa, synthetic construct
SDYGMN

SEQ ID NO: 3914 - protein, 6 aa, synthetic construct
SSYSMN

SEQ ID NO: 3915 - protein, 6 aa, synthetic construct
DSYSMN

SEQ ID NO: 3916 - protein, 6 aa, synthetic construct
SSYGMN

SEQ ID NO: 3917 - protein, 6 aa, synthetic construct
DSYSMN

SEQ ID NO: 3918 - protein, 6 aa, synthetic construct
SSYGMN

SEQ ID NO: 3919 - protein, 6 aa, synthetic construct
SSYSMN

SEQ ID NO: 3920 - protein, 6 aa, synthetic construct
DSYSMN

SEQ ID NO: 3921 - protein, 6 aa, synthetic construct
SDYSMN

SEQ ID NO: 3922 - protein, 6 aa, synthetic construct
DDYSMN

SEQ ID NO: 3923 - protein, 6 aa, synthetic construct
SDYSMN

SEQ ID NO: 3924 - protein, 6 aa, synthetic construct
SDYGMN

SEQ ID NO: 3925 - protein, 6 aa, synthetic construct
DSYGMN

SEQ ID NO: 3926 - protein, 6 aa, synthetic construct
SDYSMN

SEQ ID NO: 3927 - protein, 6 aa, synthetic construct
SSYGMN

SEQ ID NO: 3928 - protein, 6 aa, synthetic construct
SSYGMH

SEQ ID NO: 3929 - protein, 6 aa, synthetic construct
DSYGMN

SEQ ID NO: 3930 - protein, 6 aa, synthetic construct
DSYGMN

SEQ ID NO: 3931 - protein, 6 aa, synthetic construct
DSYGMN

SEQ ID NO: 3932 - protein, 6 aa, synthetic construct
DSYGMN

SEQ ID NO: 3933 - protein, 6 aa, synthetic construct
SSYGMN

SEQ ID NO: 3934 - protein, 6 aa, synthetic construct
SSYGMN

SEQ ID NO: 3935 - protein, 6 aa, synthetic construct
SSYSMN

SEQ ID NO: 3936 - protein, 6 aa, synthetic construct
DSYSMN

SEQ ID NO: 3937 - protein, 6 aa, synthetic construct
SSYGMH

SEQ ID NO: 3938 - protein, 6 aa, synthetic construct
SSYSMN

SEQ ID NO: 3939 - protein, 6 aa, synthetic construct
DSYSMN

SEQ ID NO: 3940 - protein, 6 aa, synthetic construct
DSYSMN

SEQ ID NO: 3941 - protein, 6 aa, synthetic construct
DSYSMN

SEQ ID NO: 3942 - protein, 6 aa, synthetic construct
SDYSMN

SEQ ID NO: 3943 - protein, 6 aa, synthetic construct
SSYSMN

SEQ ID NO: 3944 - protein, 6 aa, synthetic construct
SSYGMN

SEQ ID NO: 3945 - protein, 6 aa, synthetic construct
DSYSMN

SEQ ID NO: 3946 - protein, 6 aa, synthetic construct
DSYGMN

SEQ ID NO: 3947 - protein, 6 aa, synthetic construct
SSYSMN

SEQ ID NO: 3948 - protein, 6 aa, synthetic construct
DSYGMN

SEQ ID NO: 3949 - protein, 6 aa, synthetic construct
SSYGMN

SEQ ID NO: 3950 - protein, 6 aa, synthetic construct
SSYSMN

SEQ ID NO: 3951 - protein, 6 aa, synthetic construct
DDYSMN

SEQ ID NO: 3952 - protein, 6 aa, synthetic construct
DSYGMN

SEQ ID NO: 3953 - protein, 6 aa, synthetic construct
DDYSMN

SEQ ID NO: 3954 - protein, 6 aa, synthetic construct
SDYSMN

SEQ ID NO: 3955 - protein, 6 aa, synthetic construct
SDYGMN

SEQ ID NO: 3956 - protein, 6 aa, synthetic construct
SSYGMN

SEQ ID NO: 3957 - protein, 6 aa, synthetic construct
SSYGMN

SEQ ID NO: 3958 - protein, 6 aa, synthetic construct
SSYSMN

SEQ ID NO: 3959 - protein, 6 aa, synthetic construct
SSYSMN

SEQ ID NO: 3960 - protein, 6 aa, synthetic construct
DSYSMN

SEQ ID NO: 3961 - protein, 6 aa, synthetic construct
DSYSMN

SEQ ID NO: 3962 - protein, 6 aa, synthetic construct
SSYSMN

SEQ ID NO: 3963 - protein, 6 aa, synthetic construct
SSYGMN

SEQ ID NO: 3964 - protein, 6 aa, synthetic construct
SDYGMN

SEQ ID NO: 3965 - protein, 6 aa, synthetic construct
SSYGMN

SEQ ID NO: 3966 - protein, 6 aa, synthetic construct
SDYGMH

SEQ ID NO: 3967 - protein, 6 aa, synthetic construct
DSYSMN

SEQ ID NO: 3968 - protein, 6 aa, synthetic construct
DSYGMN

SEQ ID NO: 3969 - protein, 6 aa, synthetic construct
SSYSMN

SEQ ID NO: 3970 - protein, 6 aa, synthetic construct
DSYSMN

SEQ ID NO: 3971 - protein, 6 aa, synthetic construct
SDYSMN

SEQ ID NO: 3972 - protein, 6 aa, synthetic construct
SSYSMN

SEQ ID NO: 3973 - protein, 6 aa, synthetic construct
DDYSMN

SEQ ID NO: 3974 - protein, 6 aa, synthetic construct
SSYGMN

SEQ ID NO: 3975 - protein, 6 aa, synthetic construct
DSYSMN

SEQ ID NO: 3976 - protein, 6 aa, synthetic construct
SSYSMN

SEQ ID NO: 3977 - protein, 6 aa, synthetic construct
DDYSMN

SEQ ID NO: 3978 - protein, 6 aa, synthetic construct
SSYGMH

SEQ ID NO: 3979 - protein, 6 aa, synthetic construct
SSYSMN

SEQ ID NO: 3980 - protein, 6 aa, synthetic construct
SSYSMN

SEQ ID NO: 3981 - protein, 6 aa, synthetic construct
SDYSMN

SEQ ID NO: 3982 - protein, 6 aa, synthetic construct
SSYGMH

SEQ ID NO: 3983 - protein, 6 aa, synthetic construct
DSYGMN

SEQ ID NO: 3984 - protein, 6 aa, synthetic construct
SDYGMH

SEQ ID NO: 3985 - protein, 6 aa, synthetic construct
SSYSMN

SEQ ID NO: 3986 - protein, 6 aa, synthetic construct
DDYSMN

SEQ ID NO: 3987 - protein, 6 aa, synthetic construct
DDYSMN

SEQ ID NO: 3988 - protein, 6 aa, synthetic construct
SSYSMN

SEQ ID NO: 3989 - protein, 6 aa, synthetic construct
DSYSMN

SEQ ID NO: 3990 - protein, 6 aa, synthetic construct
DSYSMN

SEQ ID NO: 3991 - protein, 6 aa, synthetic construct
DSYGMN

SEQ ID NO: 3992 - protein, 6 aa, synthetic construct
SSYSMN

SEQ ID NO: 3993 - protein, 6 aa, synthetic construct
DSYGMN

SEQ ID NO: 3994 - protein, 6 aa, synthetic construct
DSYSMN

SEQ ID NO: 3995 - protein, 6 aa, synthetic construct
SSYSMN

SEQ ID NO: 3996 - protein, 6 aa, synthetic construct
SSYGMN

SEQ ID NO: 3997 - protein, 6 aa, synthetic construct
SSYGMN

SEQ ID NO: 3998 - protein, 6 aa, synthetic construct
SSYGMN

SEQ ID NO: 3999 - protein, 6 aa, synthetic construct
DSYGMN

SEQ ID NO: 4000 - protein, 6 aa, synthetic construct
SSYGMN

SEQ ID NO: 4001 - protein, 6 aa, synthetic construct
SSYSMN

SEQ ID NO: 4002 - protein, 6 aa, synthetic construct
SSYSMN

SEQ ID NO: 4003 - protein, 6 aa, synthetic construct
SDYSMN

SEQ ID NO: 4004 - protein, 6 aa, synthetic construct
SSYSMN

SEQ ID NO: 4005 - protein, 6 aa, synthetic construct
DDYSMN

SEQ ID NO: 4006 - protein, 6 aa, synthetic construct
DSYSMN

SEQ ID NO: 4007 - protein, 6 aa, synthetic construct
SSYGMN

SEQ ID NO: 4008 - protein, 6 aa, synthetic construct
SDYSMN

SEQ ID NO: 4009 - protein, 6 aa, synthetic construct
SDYSMN

SEQ ID NO: 4010 - protein, 6 aa, synthetic construct
DSYSMN

SEQ ID NO: 4011 - protein, 6 aa, synthetic construct
SNYGMN

SEQ ID NO: 4012 - protein, 6 aa, synthetic construct
SSYSMN

SEQ ID NO: 4013 - protein, 6 aa, synthetic construct
SDYSMN

SEQ ID NO: 4014 - protein, 6 aa, synthetic construct
DSYSMN

SEQ ID NO: 4015 - protein, 6 aa, synthetic construct
SSYSMN

SEQ ID NO: 4016 - protein, 6 aa, synthetic construct
DSYSMN

SEQ ID NO: 4017 - protein, 6 aa, synthetic construct
SSYSMN

SEQ ID NO: 4018 - protein, 6 aa, synthetic construct
SSYSMN

SEQ ID NO: 4019 - protein, 6 aa, synthetic construct
DSYSMN

SEQ ID NO: 4020 - protein, 6 aa, synthetic construct
SDYSMN

SEQ ID NO: 4021 - protein, 6 aa, synthetic construct
SSYSMN

SEQ ID NO: 4022 - protein, 6 aa, synthetic construct
DSYGMH

SEQ ID NO: 4023 - protein, 6 aa, synthetic construct
SSYSMN

SEQ ID NO: 4024 - protein, 6 aa, synthetic construct
DSYSMN

SEQ ID NO: 4025 - protein, 6 aa, synthetic construct
SSYSMN

SEQ ID NO: 4026 - protein, 6 aa, synthetic construct
SSYSMN

SEQ ID NO: 4027 - protein, 6 aa, synthetic construct
SSYGMN

SEQ ID NO: 4028 - protein, 6 aa, synthetic construct
SSYSMN

SEQ ID NO: 4029 - protein, 6 aa, synthetic construct
SSYSMN

SEQ ID NO: 4030 - protein, 6 aa, synthetic construct
DSYSMN

SEQ ID NO: 4031 - protein, 6 aa, synthetic construct
DSYSMN

SEQ ID NO: 4032 - protein, 6 aa, synthetic construct
DSYSMN

SEQ ID NO: 4033 - protein, 6 aa, synthetic construct
SSYSMN

SEQ ID NO: 4034 - protein, 6 aa, synthetic construct
DSYGMN

SEQ ID NO: 4035 - protein, 6 aa, synthetic construct
DSYGMN

SEQ ID NO: 4036 - protein, 6 aa, synthetic construct
SSYSMN

SEQ ID NO: 4037 - protein, 6 aa, synthetic construct
DSYSMN

SEQ ID NO: 4038 - protein, 6 aa, synthetic construct
DSYSMN

SEQ ID NO: 4039 - protein, 6 aa, synthetic construct
SSYSMN

SEQ ID NO: 4040 - protein, 6 aa, synthetic construct
DSYSMN

SEQ ID NO: 4041 - protein, 6 aa, synthetic construct
SSYGMH

SEQ ID NO: 4042 - protein, 6 aa, synthetic construct
SSYSMN

SEQ ID NO: 4043 - protein, 6 aa, synthetic construct
SSYSMN

SEQ ID NO: 4044 - protein, 6 aa, synthetic construct
SSYSMN

SEQ ID NO: 4045 - protein, 6 aa, synthetic construct
DSYSMN

SEQ ID NO: 4046 - protein, 6 aa, synthetic construct
DSYSMN

SEQ ID NO: 4047 - protein, 6 aa, synthetic construct
SDYSMN

SEQ ID NO: 4048 - protein, 6 aa, synthetic construct
DSYSMN

SEQ ID NO: 4049 - protein, 6 aa, synthetic construct
SSYSMN

SEQ ID NO: 4050 - protein, 6 aa, synthetic construct
SSYSMN

SEQ ID NO: 4051 - protein, 6 aa, synthetic construct
SDYSMN

SEQ ID NO: 4052 - protein, 6 aa, synthetic construct
DSYSMN

SEQ ID NO: 4053 - protein, 6 aa, synthetic construct
SSYSMN

SEQ ID NO: 4054 - protein, 6 aa, synthetic construct
DSYSMN

SEQ ID NO: 4055 - protein, 6 aa, synthetic construct
DSYSMN

SEQ ID NO: 4056 - protein, 6 aa, synthetic construct
SSYSMN

SEQ ID NO: 4057 - protein, 6 aa, synthetic construct
SSYSMN

SEQ ID NO: 4058 - protein, 6 aa, synthetic construct
DSYSMN

SEQ ID NO: 4059 - protein, 6 aa, synthetic construct
SDYSMN

SEQ ID NO: 4060 - protein, 6 aa, synthetic construct
SSYSMN

SEQ ID NO: 4061 - protein, 6 aa, synthetic construct
SSYSMN

SEQ ID NO: 4062 - protein, 6 aa, synthetic construct
SDYSMN

SEQ ID NO: 4063 - protein, 6 aa, synthetic construct
SDYSMN

SEQ ID NO: 4064 - protein, 6 aa, synthetic construct
SSYSMN

SEQ ID NO: 4065 - protein, 6 aa, synthetic construct
SSYSMN

SEQ ID NO: 4066 - protein, 6 aa, synthetic construct
SSYSMN

SEQ ID NO: 4067 - protein, 6 aa, synthetic construct
SSYSMN

SEQ ID NO: 4068 - protein, 6 aa, synthetic construct
SDYSMN

SEQ ID NO: 4069 - protein, 6 aa, synthetic construct
SSYGMN

SEQ ID NO: 4070 - protein, 6 aa, synthetic construct
SSYGMN

SEQ ID NO: 4071 - protein, 6 aa, synthetic construct
SSYSMN

SEQ ID NO: 4072 - protein, 6 aa, synthetic construct
SSYSMN

SEQ ID NO: 4073 - protein, 6 aa, synthetic construct
SSYSMN

SEQ ID NO: 4074 - protein, 6 aa, synthetic construct
SSYGMN

SEQ ID NO: 4075 - protein, 6 aa, synthetic construct
SSYSMN

SEQ ID NO: 4076 - protein, 6 aa, synthetic construct
SDYSMN

SEQ ID NO: 4077 - protein, 6 aa, synthetic construct
SSYGMN

SEQ ID NO: 4078 - protein, 6 aa, synthetic construct
DSYSMN

SEQ ID NO: 4079 - protein, 6 aa, synthetic construct
DSYSMN

SEQ ID NO: 4080 - protein, 6 aa, synthetic construct
SSYSMN

SEQ ID NO: 4081 - protein, 6 aa, synthetic construct
SSYSMN

SEQ ID NO: 4082 - protein, 6 aa, synthetic construct
SDYSMN

SEQ ID NO: 4083 - protein, 6 aa, synthetic construct
SSYGMN

SEQ ID NO: 4084 - protein, 6 aa, synthetic construct
SSYSMN

SEQ ID NO: 4085 - protein, 6 aa, synthetic construct
SSYGMN

SEQ ID NO: 4086 - protein, 6 aa, synthetic construct
DSYGMN

SEQ ID NO: 4087 - protein, 6 aa, synthetic construct
SDYSMN

SEQ ID NO: 4088 - protein, 6 aa, synthetic construct
SSYSMN

SEQ ID NO: 4089 - protein, 6 aa, synthetic construct
DSYSMN

SEQ ID NO: 4090 - protein, 13 aa, synthetic construct
WVSGINYNGGYKG

SEQ ID NO: 4091 - protein, 13 aa, synthetic construct
WVSSINYNSGYKG

SEQ ID NO: 4092 - protein, 13 aa, synthetic construct
WVSNINYNGGYTG

SEQ ID NO: 4093 - protein, 13 aa, synthetic construct
WVSGINYNGGYKG

SEQ ID NO: 4094 - protein, 13 aa, synthetic construct
WVSSINYNGGYTS

SEQ ID NO: 4095 - protein, 13 aa, synthetic construct
WVAGINYNSGYKG

SEQ ID NO: 4096 - protein, 13 aa, synthetic construct
WVAGINYNGGYTG

SEQ ID NO: 4097 - protein, 13 aa, synthetic construct
WVSGINYNGGYKG

SEQ ID NO: 4098 - protein, 13 aa, synthetic construct
WVSGINYNGGYKS

SEQ ID NO: 4099 - protein, 13 aa, synthetic construct
WVSGINYNGGYTS

SEQ ID NO: 4100 - protein, 13 aa, synthetic construct
WVASINYNGGYKS

SEQ ID NO: 4101 - protein, 13 aa, synthetic construct
WVSGINYNSGYKG

SEQ ID NO: 4102 - protein, 13 aa, synthetic construct
WVSGINYNSGYKS

SEQ ID NO: 4103 - protein, 13 aa, synthetic construct
WVSGINYNGGYTS

SEQ ID NO: 4104 - protein, 13 aa, synthetic construct
WVSNINYNGGYKS

SEQ ID NO: 4105 - protein, 13 aa, synthetic construct
WVSNINYNGGYTS

SEQ ID NO: 4106 - protein, 13 aa, synthetic construct
WVSGINYNSGYTG

SEQ ID NO: 4107 - protein, 13 aa, synthetic construct
WVSGINYNSGYKG

SEQ ID NO: 4108 - protein, 13 aa, synthetic construct
WVSNINYNGGYKS

SEQ ID NO: 4109 - protein, 13 aa, synthetic construct
WVAGINYNGGYTS

SEQ ID NO: 4110 - protein, 13 aa, synthetic construct
WVASINYNGGYKG

SEQ ID NO: 4111 - protein, 13 aa, synthetic construct
WVAGINYNGGYTS

SEQ ID NO: 4112 - protein, 13 aa, synthetic construct
WVAGINYNSGYTS

SEQ ID NO: 4113 - protein, 13 aa, synthetic construct
WVSGINYNSGYTS

SEQ ID NO: 4114 - protein, 13 aa, synthetic construct
WVAGINYNGGYKG

SEQ ID NO: 4115 - protein, 13 aa, synthetic construct
WVSGINYNSGYKS

SEQ ID NO: 4116 - protein, 13 aa, synthetic construct
WVASINYNGGYKS

SEQ ID NO: 4117 - protein, 13 aa, synthetic construct
WVSSINYNSGYTG

SEQ ID NO: 4118 - protein, 13 aa, synthetic construct
WVSGINYNGGYTS

SEQ ID NO: 4119 - protein, 13 aa, synthetic construct
WVSSINYNGGYTG

SEQ ID NO: 4120 - protein, 13 aa, synthetic construct
WVAGINYNGGYTS

SEQ ID NO: 4121 - protein, 13 aa, synthetic construct
WVAGINYNGGYTS

SEQ ID NO: 4122 - protein, 13 aa, synthetic construct
WVSSINYNGGYTG

SEQ ID NO: 4123 - protein, 13 aa, synthetic construct
WVAGINYNGGYTS

SEQ ID NO: 4124 - protein, 13 aa, synthetic construct
WVSNINYNGGYKS

SEQ ID NO: 4125 - protein, 13 aa, synthetic construct
WVASINYNSGYTG

SEQ ID NO: 4126 - protein, 13 aa, synthetic construct
WVAGINYNSGYTS

SEQ ID NO: 4127 - protein, 13 aa, synthetic construct
WVSSINYNGGYTG

SEQ ID NO: 4128 - protein, 13 aa, synthetic construct
WVAGINYNSGYTS

SEQ ID NO: 4129 - protein, 13 aa, synthetic construct
WVSGINYNGGYTG

SEQ ID NO: 4130 - protein, 13 aa, synthetic construct
WVAGINYNGGYKS

SEQ ID NO: 4131 - protein, 13 aa, synthetic construct
WVSNINYNGGYKG

SEQ ID NO: 4132 - protein, 13 aa, synthetic construct
WVANINYNGGYKG

SEQ ID NO: 4133 - protein, 13 aa, synthetic construct
WVSGINYNGGYTS

SEQ ID NO: 4134 - protein, 13 aa, synthetic construct
WVAGINYNGGYTS

SEQ ID NO: 4135 - protein, 13 aa, synthetic construct
WVSGINYNSGYTS

SEQ ID NO: 4136 - protein, 13 aa, synthetic construct
WVAGINYNSGYTS

SEQ ID NO: 4137 - protein, 13 aa, synthetic construct
WVANINYNGGYKS

SEQ ID NO: 4138 - protein, 13 aa, synthetic construct
WVAGINYNGGYKG

SEQ ID NO: 4139 - protein, 13 aa, synthetic construct
WVSGINYNGGYKS

SEQ ID NO: 4140 - protein, 13 aa, synthetic construct
WVAGINYNGGYTS

SEQ ID NO: 4141 - protein, 13 aa, synthetic construct
WVSGINYNGGYTS

SEQ ID NO: 4142 - protein, 13 aa, synthetic construct
WVSGINYNGGYKS

SEQ ID NO: 4143 - protein, 13 aa, synthetic construct
WVSNINYNGGYTS

SEQ ID NO: 4144 - protein, 13 aa, synthetic construct
WVSGINYNGGYTS

SEQ ID NO: 4145 - protein, 13 aa, synthetic construct
WVSGINYNSGYTS

SEQ ID NO: 4146 - protein, 13 aa, synthetic construct
WVSSINYNGGYKG

SEQ ID NO: 4147 - protein, 13 aa, synthetic construct
WVAGINYNGGYTG

SEQ ID NO: 4148 - protein, 13 aa, synthetic construct
WVANINYNGGYTG

SEQ ID NO: 4149 - protein, 13 aa, synthetic construct
WVSGINYNSGYTS

SEQ ID NO: 4150 - protein, 13 aa, synthetic construct
WVSGINYNGGYKG

SEQ ID NO: 4151 - protein, 13 aa, synthetic construct
WVSSINYNGGYTG

SEQ ID NO: 4152 - protein, 13 aa, synthetic construct
WVSNINYNGGYKG

SEQ ID NO: 4153 - protein, 13 aa, synthetic construct
WVSSINYNSGYKS

SEQ ID NO: 4154 - protein, 13 aa, synthetic construct
WVSGINYNSGYTS

SEQ ID NO: 4155 - protein, 13 aa, synthetic construct
WVAGINYNGGYKS

SEQ ID NO: 4156 - protein, 13 aa, synthetic construct
WVSGINYNGGYKG

SEQ ID NO: 4157 - protein, 13 aa, synthetic construct
WVASINYNGGYTS

SEQ ID NO: 4158 - protein, 13 aa, synthetic construct
WVSGINYNGGYKS

SEQ ID NO: 4159 - protein, 13 aa, synthetic construct
WVAGINYNSGYTG

SEQ ID NO: 4160 - protein, 13 aa, synthetic construct
WVAGINYNSGYTS

SEQ ID NO: 4161 - protein, 13 aa, synthetic construct
WVSSINYNGGYTG

SEQ ID NO: 4162 - protein, 13 aa, synthetic construct
WVSGINYNSGYKG

SEQ ID NO: 4163 - protein, 13 aa, synthetic construct
WVANINYNGGYTG

SEQ ID NO: 4164 - protein, 13 aa, synthetic construct
WVAGINYNSGYKS

SEQ ID NO: 4165 - protein, 13 aa, synthetic construct
WVAGINYNGGYKS

SEQ ID NO: 4166 - protein, 13 aa, synthetic construct
WVAGINYNGGYTG

SEQ ID NO: 4167 - protein, 13 aa, synthetic construct
WVSGINYNGGYTS

SEQ ID NO: 4168 - protein, 13 aa, synthetic construct
WVAGINYNGGYTS

SEQ ID NO: 4169 - protein, 13 aa, synthetic construct
WVAGINYNGGYTS

SEQ ID NO: 4170 - protein, 13 aa, synthetic construct
WVSGINYNSGYTS

SEQ ID NO: 4171 - protein, 13 aa, synthetic construct
WVSGINYNGGYTS

SEQ ID NO: 4172 - protein, 13 aa, synthetic construct
WVASINYNGGYTS

SEQ ID NO: 4173 - protein, 13 aa, synthetic construct
WVSGINYNGGYKS

SEQ ID NO: 4174 - protein, 13 aa, synthetic construct
WVANINYNGGYTG

SEQ ID NO: 4175 - protein, 13 aa, synthetic construct
WVSNINYNSGYTS

SEQ ID NO: 4176 - protein, 13 aa, synthetic construct
WVSNINYNGGYTG

SEQ ID NO: 4177 - protein, 13 aa, synthetic construct
WVSGINYNSGYKS

SEQ ID NO: 4178 - protein, 13 aa, synthetic construct
WVSGINYNGGYTS

SEQ ID NO: 4179 - protein, 13 aa, synthetic construct
WVASINYNGGYKG

SEQ ID NO: 4180 - protein, 13 aa, synthetic construct
WVAGINYNSGYKS

SEQ ID NO: 4181 - protein, 13 aa, synthetic construct
WVSGINYNSGYTS

SEQ ID NO: 4182 - protein, 13 aa, synthetic construct
WVSGINYNGGYTS

SEQ ID NO: 4183 - protein, 13 aa, synthetic construct
WVAGINYNSGYKS

SEQ ID NO: 4184 - protein, 13 aa, synthetic construct
WVSGINYNGGYKG

SEQ ID NO: 4185 - protein, 13 aa, synthetic construct
WVAGINYNGGYTG

SEQ ID NO: 4186 - protein, 13 aa, synthetic construct
WVSNINYNGGYTG

SEQ ID NO: 4187 - protein, 13 aa, synthetic construct
WVANINYNGGYTG

SEQ ID NO: 4188 - protein, 13 aa, synthetic construct
WVSGINYNSGYKS

SEQ ID NO: 4189 - protein, 13 aa, synthetic construct
WVAGINYNGGYTS

SEQ ID NO: 4190 - protein, 13 aa, synthetic construct
WVANINYNGGYTG

SEQ ID NO: 4191 - protein, 13 aa, synthetic construct
WVSSINYNGGYTS

SEQ ID NO: 4192 - protein, 13 aa, synthetic construct
WVSNINYNGGYKS

SEQ ID NO: 4193 - protein, 13 aa, synthetic construct
WVSGINYNGGYTS

SEQ ID NO: 4194 - protein, 13 aa, synthetic construct
WVSGINYNGGYKS

SEQ ID NO: 4195 - protein, 13 aa, synthetic construct
WVAGINYNSGYTS

SEQ ID NO: 4196 - protein, 13 aa, synthetic construct
WVAGINYNGGYTS

SEQ ID NO: 4197 - protein, 13 aa, synthetic construct
WVSGINYNGGYTS

SEQ ID NO: 4198 - protein, 13 aa, synthetic construct
WVSSINYNSGYKG

SEQ ID NO: 4199 - protein, 13 aa, synthetic construct
WVSGINYNGGYTS

SEQ ID NO: 4200 - protein, 13 aa, synthetic construct
WVSGINYNGGYTS

SEQ ID NO: 4201 - protein, 13 aa, synthetic construct
WVSGINYNSGYTS

SEQ ID NO: 4202 - protein, 13 aa, synthetic construct
WVSNINYNGGYTG

SEQ ID NO: 4203 - protein, 13 aa, synthetic construct
WVSNINYNGGYTS

SEQ ID NO: 4204 - protein, 13 aa, synthetic construct
WVSGINYNSGYKS

SEQ ID NO: 4205 - protein, 13 aa, synthetic construct
WVAGINYNGGYTS

SEQ ID NO: 4206 - protein, 13 aa, synthetic construct
WVASINYNSGYKS

SEQ ID NO: 4207 - protein, 13 aa, synthetic construct
WVSSINYNSGYTS

SEQ ID NO: 4208 - protein, 13 aa, synthetic construct
WVSSINYNGGYKG

SEQ ID NO: 4209 - protein, 13 aa, synthetic construct
WVSGINYNGGYTS

SEQ ID NO: 4210 - protein, 13 aa, synthetic construct
WVSGINYNSGYTS

SEQ ID NO: 4211 - protein, 13 aa, synthetic construct
WVAGINYNGGYTS

SEQ ID NO: 4212 - protein, 13 aa, synthetic construct
WVSSINYNSGYTS

SEQ ID NO: 4213 - protein, 13 aa, synthetic construct
WVSGINYNSGYKS

SEQ ID NO: 4214 - protein, 13 aa, synthetic construct
WVSSINYNGGYKG

SEQ ID NO: 4215 - protein, 13 aa, synthetic construct
WVAGINYNGGYKS

SEQ ID NO: 4216 - protein, 13 aa, synthetic construct
WVAGINYNGGYKS

SEQ ID NO: 4217 - protein, 13 aa, synthetic construct
WVSGINYNSGYTG

SEQ ID NO: 4218 - protein, 13 aa, synthetic construct
WVSGINYNGGYTS

SEQ ID NO: 4219 - protein, 13 aa, synthetic construct
WVSGINYNSGYKS

SEQ ID NO: 4220 - protein, 13 aa, synthetic construct
WVASINYNGGYTS

SEQ ID NO: 4221 - protein, 13 aa, synthetic construct
WVSGINYNGGYKS

SEQ ID NO: 4222 - protein, 13 aa, synthetic construct
WVSGINYNGGYKS

SEQ ID NO: 4223 - protein, 13 aa, synthetic construct
WVSGINYNGGYTS

SEQ ID NO: 4224 - protein, 13 aa, synthetic construct
WVASINYNGGYTG

SEQ ID NO: 4225 - protein, 13 aa, synthetic construct
WVSGINYNGGYKS

SEQ ID NO: 4226 - protein, 13 aa, synthetic construct
WVSGINYNGGYTS

SEQ ID NO: 4227 - protein, 13 aa, synthetic construct
WVSGINYNGGYTS

SEQ ID NO: 4228 - protein, 13 aa, synthetic construct
WVAGINYNGGYKG

SEQ ID NO: 4229 - protein, 13 aa, synthetic construct
WVSSINYNSGYTS

SEQ ID NO: 4230 - protein, 13 aa, synthetic construct
WVSGINYNGGYTS

SEQ ID NO: 4231 - protein, 13 aa, synthetic construct
WVAGINYNGGYTS

SEQ ID NO: 4232 - protein, 13 aa, synthetic construct
WVSGINYNGGYTS

SEQ ID NO: 4233 - protein, 13 aa, synthetic construct
WVAGINYNGGYTS

SEQ ID NO: 4234 - protein, 13 aa, synthetic construct
WVSSINYNSGYTG

SEQ ID NO: 4235 - protein, 13 aa, synthetic construct
WVAGINYNGGYTG

SEQ ID NO: 4236 - protein, 13 aa, synthetic construct
WVSGINYNSGYKS

SEQ ID NO: 4237 - protein, 13 aa, synthetic construct
WVAGINYNGGYKS

SEQ ID NO: 4238 - protein, 13 aa, synthetic construct
WVAGINYNGGYTS

SEQ ID NO: 4239 - protein, 13 aa, synthetic construct
WVSGINYNGGYTG

SEQ ID NO: 4240 - protein, 13 aa, synthetic construct
WVAGINYNGGYTS

SEQ ID NO: 4241 - protein, 13 aa, synthetic construct
WVAGINYNGGYTS

SEQ ID NO: 4242 - protein, 13 aa, synthetic construct
WVANINYNGGYTG

SEQ ID NO: 4243 - protein, 13 aa, synthetic construct
WVAGINYNGGYTS

SEQ ID NO: 4244 - protein, 13 aa, synthetic construct
WVSGINYNGGYKS

SEQ ID NO: 4245 - protein, 13 aa, synthetic construct
WVSGINYNGGYTS

SEQ ID NO: 4246 - protein, 13 aa, synthetic construct
WVASINYNSGYTS

SEQ ID NO: 4247 - protein, 13 aa, synthetic construct
WVSNINYNGGYTG

SEQ ID NO: 4248 - protein, 13 aa, synthetic construct
WVSSINYNSGYKS

SEQ ID NO: 4249 - protein, 13 aa, synthetic construct
WVASINYNSGYTG

SEQ ID NO: 4250 - protein, 13 aa, synthetic construct
WVAGINYNGGYTS

SEQ ID NO: 4251 - protein, 13 aa, synthetic construct
WVSNINYNGGYTG

SEQ ID NO: 4252 - protein, 13 aa, synthetic construct
WVAGINYNGGYTS

SEQ ID NO: 4253 - protein, 13 aa, synthetic construct
WVAGINYNGGYTG

SEQ ID NO: 4254 - protein, 13 aa, synthetic construct
WVAGINYNSGYKS

SEQ ID NO: 4255 - protein, 13 aa, synthetic construct
WVAGINYNGGYKG

SEQ ID NO: 4256 - protein, 13 aa, synthetic construct
WVSNINYNGGYTG

SEQ ID NO: 4257 - protein, 13 aa, synthetic construct
WVAGINYNSGYTG

SEQ ID NO: 4258 - protein, 13 aa, synthetic construct
WVSGINYNGGYTS

SEQ ID NO: 4259 - protein, 13 aa, synthetic construct
WVAGINYNGGYKG

SEQ ID NO: 4260 - protein, 13 aa, synthetic construct
WVSGINYNGGYTS

SEQ ID NO: 4261 - protein, 13 aa, synthetic construct
WVAGINYNGGYKS

SEQ ID NO: 4262 - protein, 13 aa, synthetic construct
WVSGINYNGGYTG

SEQ ID NO: 4263 - protein, 13 aa, synthetic construct
WVAGINYNGGYTS

SEQ ID NO: 4264 - protein, 13 aa, synthetic construct
WVAGINYNGGYTG

SEQ ID NO: 4265 - protein, 13 aa, synthetic construct
WVAGINYNGGYTS

SEQ ID NO: 4266 - protein, 13 aa, synthetic construct
WVAGINYNGGYKG

SEQ ID NO: 4267 - protein, 13 aa, synthetic construct
WVAGINYNGGYKG

SEQ ID NO: 4268 - protein, 13 aa, synthetic construct
WVSNINYNGGYTG

SEQ ID NO: 4269 - protein, 12 aa, synthetic construct
ARGANWHDTHLD

SEQ ID NO: 4270 - protein, 12 aa, synthetic construct
ARGANWHDTHLD

SEQ ID NO: 4271 - protein, 12 aa, synthetic construct
ARGANWHDTALD

SEQ ID NO: 4272 - protein, 12 aa, synthetic construct
ARGANWHDTHLD

SEQ ID NO: 4273 - protein, 12 aa, synthetic construct
ARGANWHDTHLD

SEQ ID NO: 4274 - protein, 12 aa, synthetic construct
ARGANWHDTHLD

SEQ ID NO: 4275 - protein, 12 aa, synthetic construct
ARGANWHDTHLD

SEQ ID NO: 4276 - protein, 12 aa, synthetic construct
ARGANWHDTALD

SEQ ID NO: 4277 - protein, 12 aa, synthetic construct
ARGANWHDTHLD

SEQ ID NO: 4278 - protein, 12 aa, synthetic construct
ARGANWHDTHLD

SEQ ID NO: 4279 - protein, 12 aa, synthetic construct
ARGANWHDTHLD

SEQ ID NO: 4280 - protein, 12 aa, synthetic construct
ARGANWHDTHLD

SEQ ID NO: 4281 - protein, 12 aa, synthetic construct
ARGANWHDTALD

SEQ ID NO: 4282 - protein, 12 aa, synthetic construct
ARGANWHDTHLD

SEQ ID NO: 4283 - protein, 12 aa, synthetic construct
ARGANWHDTHLD

SEQ ID NO: 4284 - protein, 12 aa, synthetic construct
ARGANWHDTHLD

SEQ ID NO: 4285 - protein, 12 aa, synthetic construct
ARGANWHDTHLD

SEQ ID NO: 4286 - protein, 12 aa, synthetic construct
ARGANWHDTHLD

SEQ ID NO: 4287 - protein, 12 aa, synthetic construct
ARGANWHDTHLD

SEQ ID NO: 4288 - protein, 12 aa, synthetic construct
ARGANWHDTALD

SEQ ID NO: 4289 - protein, 12 aa, synthetic construct
ARGANWHDTHLD

SEQ ID NO: 4290 - protein, 12 aa, synthetic construct
ARGANWHDTHLD

SEQ ID NO: 4291 - protein, 12 aa, synthetic construct
ARGANWHDTHLD

SEQ ID NO: 4292 - protein, 12 aa, synthetic construct
ARGANWHDTHLD

SEQ ID NO: 4293 - protein, 12 aa, synthetic construct
ARGANWHDTALD

SEQ ID NO: 4294 - protein, 12 aa, synthetic construct
ARGANWHDTHLD

SEQ ID NO: 4295 - protein, 12 aa, synthetic construct
ARGANWHDTHLD

SEQ ID NO: 4296 - protein, 12 aa, synthetic construct
ARGANWHDTHLD

SEQ ID NO: 4297 - protein, 12 aa, synthetic construct
ARGANWHDTALD

SEQ ID NO: 4298 - protein, 12 aa, synthetic construct
ARGANWHDTHLD

SEQ ID NO: 4299 - protein, 12 aa, synthetic construct
ARGANWHDTHLD

SEQ ID NO: 4300 - protein, 12 aa, synthetic construct
ARGANWHDTHLD

SEQ ID NO: 4301 - protein, 12 aa, synthetic construct
ARGANWHDTHLD

SEQ ID NO: 4302 - protein, 12 aa, synthetic construct
ARGANWHDTHLD

SEQ ID NO: 4303 - protein, 12 aa, synthetic construct
ARGANWHDTHLD

SEQ ID NO: 4304 - protein, 12 aa, synthetic construct
ARGANWHDTHLD

SEQ ID NO: 4305 - protein, 12 aa, synthetic construct
ARGANWHDTHLD

SEQ ID NO: 4306 - protein, 12 aa, synthetic construct
ARGANWHDTHLD

SEQ ID NO: 4307 - protein, 12 aa, synthetic construct
ARGANWHDTHLD

SEQ ID NO: 4308 - protein, 12 aa, synthetic construct
ARGANWHDTHLD

SEQ ID NO: 4309 - protein, 12 aa, synthetic construct
ARGANWHDTHLD

SEQ ID NO: 4310 - protein, 12 aa, synthetic construct
ARGANWHDTHLD

SEQ ID NO: 4311 - protein, 12 aa, synthetic construct
ARGANWHDTHLD

SEQ ID NO: 4312 - protein, 12 aa, synthetic construct
ARGANWHDTHLD

SEQ ID NO: 4313 - protein, 12 aa, synthetic construct
ARGANWHDTHLD

SEQ ID NO: 4314 - protein, 12 aa, synthetic construct
ARGANWHDTHLD

SEQ ID NO: 4315 - protein, 12 aa, synthetic construct
ARGANWHDTALD

SEQ ID NO: 4316 - protein, 12 aa, synthetic construct
ARGANWHDTHLD

SEQ ID NO: 4317 - protein, 12 aa, synthetic construct
ARGANWHDTALD

SEQ ID NO: 4318 - protein, 12 aa, synthetic construct
ARGANWHDTHLD

SEQ ID NO: 4319 - protein, 12 aa, synthetic construct
ARGANWHDTALD

SEQ ID NO: 4320 - protein, 12 aa, synthetic construct
ARGANWHDTHLD

SEQ ID NO: 4321 - protein, 12 aa, synthetic construct
ARGANWHDTHLD

SEQ ID NO: 4322 - protein, 12 aa, synthetic construct
ARGANWHDTALD

SEQ ID NO: 4323 - protein, 12 aa, synthetic construct
ARGANWHDTALD

SEQ ID NO: 4324 - protein, 12 aa, synthetic construct
ARGANWHDTALD

SEQ ID NO: 4325 - protein, 12 aa, synthetic construct
ARGANWHDTHLD

SEQ ID NO: 4326 - protein, 12 aa, synthetic construct
ARGANWHDTALD

SEQ ID NO: 4327 - protein, 12 aa, synthetic construct
ARGANWHDTALD

SEQ ID NO: 4328 - protein, 12 aa, synthetic construct
ARGANWHDTHLD

SEQ ID NO: 4329 - protein, 12 aa, synthetic construct
ARGANWHDTALD

SEQ ID NO: 4330 - protein, 12 aa, synthetic construct
ARGANWHDTALD

SEQ ID NO: 4331 - protein, 12 aa, synthetic construct
ARGANWHDTALD

SEQ ID NO: 4332 - protein, 12 aa, synthetic construct
ARGANWHDTALD

SEQ ID NO: 4333 - protein, 12 aa, synthetic construct
ARGANWHDTHLD

SEQ ID NO: 4334 - protein, 12 aa, synthetic construct
ARGANWHDTALD

SEQ ID NO: 4335 - protein, 12 aa, synthetic construct
ARGANWHDTALD

SEQ ID NO: 4336 - protein, 12 aa, synthetic construct
ARGANWHDTHLD

SEQ ID NO: 4337 - protein, 12 aa, synthetic construct
ARGANWHDTALD

SEQ ID NO: 4338 - protein, 12 aa, synthetic construct
ARGANWHDTHLD

SEQ ID NO: 4339 - protein, 12 aa, synthetic construct
ARGANWHDTALD

SEQ ID NO: 4340 - protein, 12 aa, synthetic construct
ARGANWHDTHLD

SEQ ID NO: 4341 - protein, 12 aa, synthetic construct
ARGANWHDTALD

SEQ ID NO: 4342 - protein, 12 aa, synthetic construct
ARGANWHDTALD

SEQ ID NO: 4343 - protein, 12 aa, synthetic construct
ARGANWHDTHLD

SEQ ID NO: 4344 - protein, 12 aa, synthetic construct
ARGANWHDTALD

SEQ ID NO: 4345 - protein, 12 aa, synthetic construct
ARGANWHDTHLD

SEQ ID NO: 4346 - protein, 12 aa, synthetic construct
ARGANWHDTALD

SEQ ID NO: 4347 - protein, 12 aa, synthetic construct
ARGANWHDTALD

SEQ ID NO: 4348 - protein, 12 aa, synthetic construct
ARGANWHDTALD

SEQ ID NO: 4349 - protein, 12 aa, synthetic construct
ARGANWHDTALD

SEQ ID NO: 4350 - protein, 12 aa, synthetic construct
ARGANWHDTALD

SEQ ID NO: 4351 - protein, 12 aa, synthetic construct
ARGANWHDTHLD

SEQ ID NO: 4352 - protein, 12 aa, synthetic construct
ARGANWHDTALD

SEQ ID NO: 4353 - protein, 12 aa, synthetic construct
ARGANWHDTALD

SEQ ID NO: 4354 - protein, 12 aa, synthetic construct
ARGANWHDTALD

SEQ ID NO: 4355 - protein, 12 aa, synthetic construct
ARGANWHDTALD

SEQ ID NO: 4356 - protein, 12 aa, synthetic construct
ARGANWHDTALD

SEQ ID NO: 4357 - protein, 12 aa, synthetic construct
ARGANWHDTALD

SEQ ID NO: 4358 - protein, 12 aa, synthetic construct
ARGANWHDTHLD

SEQ ID NO: 4359 - protein, 12 aa, synthetic construct
ARGANWHDTHLD

SEQ ID NO: 4360 - protein, 12 aa, synthetic construct
ARGANWHDTALD

SEQ ID NO: 4361 - protein, 12 aa, synthetic construct
ARGANWHDTALD

SEQ ID NO: 4362 - protein, 12 aa, synthetic construct
ARGANWHDTALD

SEQ ID NO: 4363 - protein, 12 aa, synthetic construct
ARGANWHDTALD

SEQ ID NO: 4364 - protein, 12 aa, synthetic construct
ARGANWHDTHLD

SEQ ID NO: 4365 - protein, 12 aa, synthetic construct
ARGANWHDTHLD

SEQ ID NO: 4366 - protein, 12 aa, synthetic construct
ARGANWHDTALD

SEQ ID NO: 4367 - protein, 12 aa, synthetic construct
ARGANWHDTHLD

SEQ ID NO: 4368 - protein, 12 aa, synthetic construct
ARGANWHDTALD

SEQ ID NO: 4369 - protein, 12 aa, synthetic construct
ARGANWHDTALD

SEQ ID NO: 4370 - protein, 12 aa, synthetic construct
ARGANWHDTALD

SEQ ID NO: 4371 - protein, 12 aa, synthetic construct
ARGANWHDTALD

SEQ ID NO: 4372 - protein, 12 aa, synthetic construct
ARGANWHDTALD

SEQ ID NO: 4373 - protein, 12 aa, synthetic construct
ARGANWHDTALD

SEQ ID NO: 4374 - protein, 12 aa, synthetic construct
ARGANWHDTHLD

SEQ ID NO: 4375 - protein, 12 aa, synthetic construct
ARGANWHDTALD

SEQ ID NO: 4376 - protein, 12 aa, synthetic construct
ARGANWHDTALD

SEQ ID NO: 4377 - protein, 12 aa, synthetic construct
ARGANWHDTHLD

SEQ ID NO: 4378 - protein, 12 aa, synthetic construct
ARGANWHDTALD

SEQ ID NO: 4379 - protein, 12 aa, synthetic construct
ARGANWHDTALD

SEQ ID NO: 4380 - protein, 12 aa, synthetic construct
ARGANWHDTHLD

SEQ ID NO: 4381 - protein, 12 aa, synthetic construct
ARGANWHDTALD

SEQ ID NO: 4382 - protein, 12 aa, synthetic construct
ARGANWHDTALD

SEQ ID NO: 4383 - protein, 12 aa, synthetic construct
ARGANWHDTALD

SEQ ID NO: 4384 - protein, 12 aa, synthetic construct
ARGANWHDTHLD

SEQ ID NO: 4385 - protein, 12 aa, synthetic construct
ARGANWHDTHLD

SEQ ID NO: 4386 - protein, 12 aa, synthetic construct
ARGANWHDTHLD

SEQ ID NO: 4387 - protein, 12 aa, synthetic construct
ARGANWHDTHLD

SEQ ID NO: 4388 - protein, 12 aa, synthetic construct
ARGANWHDTALD

SEQ ID NO: 4389 - protein, 12 aa, synthetic construct
ARGANWHDTALD

SEQ ID NO: 4390 - protein, 12 aa, synthetic construct
ARGANWHDTALD

SEQ ID NO: 4391 - protein, 12 aa, synthetic construct
ARGANWHDTHLD

SEQ ID NO: 4392 - protein, 12 aa, synthetic construct
ARGANWHDTALD

SEQ ID NO: 4393 - protein, 12 aa, synthetic construct
ARGANWHDTHLD

SEQ ID NO: 4394 - protein, 12 aa, synthetic construct
ARGANWHDTALD

SEQ ID NO: 4395 - protein, 12 aa, synthetic construct
ARGANWHDTHLD

SEQ ID NO: 4396 - protein, 12 aa, synthetic construct
ARGANWHDTHLD

SEQ ID NO: 4397 - protein, 12 aa, synthetic construct
ARGANWHDTALD

SEQ ID NO: 4398 - protein, 12 aa, synthetic construct
ARGANWHDTALD

SEQ ID NO: 4399 - protein, 12 aa, synthetic construct
ARGANWHDTHLD

SEQ ID NO: 4400 - protein, 12 aa, synthetic construct
ARGANWHDTALD

SEQ ID NO: 4401 - protein, 12 aa, synthetic construct
ARGANWHDTALD

SEQ ID NO: 4402 - protein, 12 aa, synthetic construct
ARGANWHDTALD

SEQ ID NO: 4403 - protein, 12 aa, synthetic construct
ARGANWHDTHLD

SEQ ID NO: 4404 - protein, 12 aa, synthetic construct
ARGANWHDTALD

SEQ ID NO: 4405 - protein, 12 aa, synthetic construct
ARGANWHDTALD

SEQ ID NO: 4406 - protein, 12 aa, synthetic construct
ARGANWHDTALD

SEQ ID NO: 4407 - protein, 12 aa, synthetic construct
ARGANWHDTHLD

SEQ ID NO: 4408 - protein, 12 aa, synthetic construct
ARGANWHDTHLD

SEQ ID NO: 4409 - protein, 12 aa, synthetic construct
ARGANWHDTALD

SEQ ID NO: 4410 - protein, 12 aa, synthetic construct
ARGANWHDTHLD

SEQ ID NO: 4411 - protein, 12 aa, synthetic construct
ARGANWHDTALD

SEQ ID NO: 4412 - protein, 12 aa, synthetic construct
ARGANWHDTALD

SEQ ID NO: 4413 - protein, 12 aa, synthetic construct
ARGANWHDTHLD

SEQ ID NO: 4414 - protein, 12 aa, synthetic construct
ARGANWHDTALD

SEQ ID NO: 4415 - protein, 12 aa, synthetic construct
ARGANWHDTALD

SEQ ID NO: 4416 - protein, 12 aa, synthetic construct
ARGANWHDTALD

SEQ ID NO: 4417 - protein, 12 aa, synthetic construct
ARGANWHDTALD

SEQ ID NO: 4418 - protein, 12 aa, synthetic construct
ARGANWHDTALD

SEQ ID NO: 4419 - protein, 12 aa, synthetic construct
ARGANWHDTALD

SEQ ID NO: 4420 - protein, 12 aa, synthetic construct
ARGANWHDTALD

SEQ ID NO: 4421 - protein, 12 aa, synthetic construct
ARGANWHDTHLD

SEQ ID NO: 4422 - protein, 12 aa, synthetic construct
ARGANWHDTALD

SEQ ID NO: 4423 - protein, 12 aa, synthetic construct
ARGANWHDTALD

SEQ ID NO: 4424 - protein, 12 aa, synthetic construct
ARGANWHDTALD

SEQ ID NO: 4425 - protein, 12 aa, synthetic construct
ARGANWHDTHLD

SEQ ID NO: 4426 - protein, 12 aa, synthetic construct
ARGANWHDTALD

SEQ ID NO: 4427 - protein, 12 aa, synthetic construct
ARGANWHDTHLD

SEQ ID NO: 4428 - protein, 12 aa, synthetic construct
ARGANWHDTHLD

SEQ ID NO: 4429 - protein, 12 aa, synthetic construct
ARGANWHDTALD

SEQ ID NO: 4430 - protein, 12 aa, synthetic construct
ARGANWHDTALD

SEQ ID NO: 4431 - protein, 12 aa, synthetic construct
ARGANWHDTALD

SEQ ID NO: 4432 - protein, 12 aa, synthetic construct
ARGANWHDTALD

SEQ ID NO: 4433 - protein, 12 aa, synthetic construct
ARGANWHDTALD

SEQ ID NO: 4434 - protein, 12 aa, synthetic construct
ARGANWHDTALD

SEQ ID NO: 4435 - protein, 12 aa, synthetic construct
ARGANWHDTALD

SEQ ID NO: 4436 - protein, 12 aa, synthetic construct
ARGANWHDTHLD

SEQ ID NO: 4437 - protein, 12 aa, synthetic construct
ARGANWHDTHLD

SEQ ID NO: 4438 - protein, 12 aa, synthetic construct
ARGANWHDTALD

SEQ ID NO: 4439 - protein, 12 aa, synthetic construct
ARGANWHDTALD

SEQ ID NO: 4440 - protein, 12 aa, synthetic construct
ARGANWHDTALD

SEQ ID NO: 4441 - protein, 12 aa, synthetic construct
ARGANWHDTHLD

SEQ ID NO: 4442 - protein, 12 aa, synthetic construct
ARGANWHDTALD

SEQ ID NO: 4443 - protein, 12 aa, synthetic construct
ARGANWHDTHLD

SEQ ID NO: 4444 - protein, 12 aa, synthetic construct
ARGANWHDTALD

SEQ ID NO: 4445 - protein, 12 aa, synthetic construct
ARGANWHDTALD

SEQ ID NO: 4446 - protein, 12 aa, synthetic construct
ARGANWHDTALD

SEQ ID NO: 4447 - protein, 12 aa, synthetic construct
ARGANWHDTALD

SEQ ID NO: 4448 - protein, 7 aa, synthetic construct
LTYLNWY

SEQ ID NO: 4449 - protein, 7 aa, synthetic construct
SSYLNWY

SEQ ID NO: 4450 - protein, 7 aa, synthetic construct
LTYLNWY

SEQ ID NO: 4451 - protein, 7 aa, synthetic construct
LTYVNWY

SEQ ID NO: 4452 - protein, 7 aa, synthetic construct
LSYLNWY

SEQ ID NO: 4453 - protein, 7 aa, synthetic construct
VSYLNWY

SEQ ID NO: 4454 - protein, 7 aa, synthetic construct
VSYVNWY

SEQ ID NO: 4455 - protein, 7 aa, synthetic construct
LSYLNWY

SEQ ID NO: 4456 - protein, 7 aa, synthetic construct
ITYLNWY

SEQ ID NO: 4457 - protein, 7 aa, synthetic construct
STYVNWY

SEQ ID NO: 4458 - protein, 7 aa, synthetic construct
SSYLNWY

SEQ ID NO: 4459 - protein, 7 aa, synthetic construct
VSYVNWY

SEQ ID NO: 4460 - protein, 7 aa, synthetic construct
SSYLNWY

SEQ ID NO: 4461 - protein, 7 aa, synthetic construct
VSYLNWY

SEQ ID NO: 4462 - protein, 7 aa, synthetic construct
LTYLNWY

SEQ ID NO: 4463 - protein, 7 aa, synthetic construct
VTYLNWY

SEQ ID NO: 4464 - protein, 7 aa, synthetic construct
LTYLNWY

SEQ ID NO: 4465 - protein, 7 aa, synthetic construct
LSYLNWY

SEQ ID NO: 4466 - protein, 7 aa, synthetic construct
LTYLNWY

SEQ ID NO: 4467 - protein, 7 aa, synthetic construct
LTYVNWY

SEQ ID NO: 4468 - protein, 7 aa, synthetic construct
LSYVNWY

SEQ ID NO: 4469 - protein, 7 aa, synthetic construct
LTYLNWY

SEQ ID NO: 4470 - protein, 7 aa, synthetic construct
ITYVNWY

SEQ ID NO: 4471 - protein, 7 aa, synthetic construct
LSYLNWY

SEQ ID NO: 4472 - protein, 7 aa, synthetic construct
SSYVNWY

SEQ ID NO: 4473 - protein, 7 aa, synthetic construct
LSYLNWY

SEQ ID NO: 4474 - protein, 7 aa, synthetic construct
LSYVNWY

SEQ ID NO: 4475 - protein, 7 aa, synthetic construct
LTYVNWY

SEQ ID NO: 4476 - protein, 7 aa, synthetic construct
VSYVNWY

SEQ ID NO: 4477 - protein, 7 aa, synthetic construct
ITYLNWY

SEQ ID NO: 4478 - protein, 7 aa, synthetic construct
STYLNWY

SEQ ID NO: 4479 - protein, 7 aa, synthetic construct
LSYLNWY

SEQ ID NO: 4480 - protein, 7 aa, synthetic construct
VSYVNWY

SEQ ID NO: 4481 - protein, 7 aa, synthetic construct
LSYLNWY

SEQ ID NO: 4482 - protein, 7 aa, synthetic construct
ISYLNWY

SEQ ID NO: 4483 - protein, 7 aa, synthetic construct
SSYLNWY

SEQ ID NO: 4484 - protein, 7 aa, synthetic construct
LSYLNWY

SEQ ID NO: 4485 - protein, 7 aa, synthetic construct
SSYLNWY

SEQ ID NO: 4486 - protein, 7 aa, synthetic construct
ITYVNWY

SEQ ID NO: 4487 - protein, 7 aa, synthetic construct
ISYLNWY

SEQ ID NO: 4488 - protein, 7 aa, synthetic construct
LTYLNWY

SEQ ID NO: 4489 - protein, 7 aa, synthetic construct
LSYLNWY

SEQ ID NO: 4490 - protein, 7 aa, synthetic construct
STYVNWY

SEQ ID NO: 4491 - protein, 7 aa, synthetic construct
LTYVNWY

SEQ ID NO: 4492 - protein, 7 aa, synthetic construct
VSYVNWY

SEQ ID NO: 4493 - protein, 7 aa, synthetic construct
LTYLNWY

SEQ ID NO: 4494 - protein, 7 aa, synthetic construct
VTYLNWY

SEQ ID NO: 4495 - protein, 7 aa, synthetic construct
VSYVNWY

SEQ ID NO: 4496 - protein, 7 aa, synthetic construct
LSYLNWY

SEQ ID NO: 4497 - protein, 7 aa, synthetic construct
ISYLNWY

SEQ ID NO: 4498 - protein, 7 aa, synthetic construct
SSYVNWY

SEQ ID NO: 4499 - protein, 7 aa, synthetic construct
LTYLNWY

SEQ ID NO: 4500 - protein, 7 aa, synthetic construct
VSYLNWY

SEQ ID NO: 4501 - protein, 7 aa, synthetic construct
LTYLNWY

SEQ ID NO: 4502 - protein, 7 aa, synthetic construct
ISYLNWY

SEQ ID NO: 4503 - protein, 7 aa, synthetic construct
LSYLNWY

SEQ ID NO: 4504 - protein, 7 aa, synthetic construct
LTYLNWY

SEQ ID NO: 4505 - protein, 7 aa, synthetic construct
VTYLNWY

SEQ ID NO: 4506 - protein, 7 aa, synthetic construct
LSYLNWY

SEQ ID NO: 4507 - protein, 7 aa, synthetic construct
LSYLNWY

SEQ ID NO: 4508 - protein, 7 aa, synthetic construct
LSYVNWY

SEQ ID NO: 4509 - protein, 7 aa, synthetic construct
LSYLNWY

SEQ ID NO: 4510 - protein, 7 aa, synthetic construct
ITYLNWY

SEQ ID NO: 4511 - protein, 7 aa, synthetic construct
LSYVNWY

SEQ ID NO: 4512 - protein, 7 aa, synthetic construct
LTYLNWY

SEQ ID NO: 4513 - protein, 7 aa, synthetic construct
LSYLNWY

SEQ ID NO: 4514 - protein, 7 aa, synthetic construct
VSYLNWY

SEQ ID NO: 4515 - protein, 7 aa, synthetic construct
LSYVNWY

SEQ ID NO: 4516 - protein, 7 aa, synthetic construct
LSYLNWY

SEQ ID NO: 4517 - protein, 7 aa, synthetic construct
LSYVNWY

SEQ ID NO: 4518 - protein, 7 aa, synthetic construct
VTYLNWY

SEQ ID NO: 4519 - protein, 7 aa, synthetic construct
VSYLNWY

SEQ ID NO: 4520 - protein, 7 aa, synthetic construct
LSYLNWY

SEQ ID NO: 4521 - protein, 7 aa, synthetic construct
LSYLNWY

SEQ ID NO: 4522 - protein, 7 aa, synthetic construct
VSYVNWY

SEQ ID NO: 4523 - protein, 7 aa, synthetic construct
VTYLNWY

SEQ ID NO: 4524 - protein, 7 aa, synthetic construct
VSYVNWY

SEQ ID NO: 4525 - protein, 7 aa, synthetic construct
STYLNWY

SEQ ID NO: 4526 - protein, 7 aa, synthetic construct
ISYLNWY

SEQ ID NO: 4527 - protein, 7 aa, synthetic construct
STYLNWY

SEQ ID NO: 4528 - protein, 7 aa, synthetic construct
SSYLNWY

SEQ ID NO: 4529 - protein, 7 aa, synthetic construct
ISYVNWY

SEQ ID NO: 4530 - protein, 7 aa, synthetic construct
LSYLNWY

SEQ ID NO: 4531 - protein, 7 aa, synthetic construct
LSYLNWY

SEQ ID NO: 4532 - protein, 7 aa, synthetic construct
LSYLNWY

SEQ ID NO: 4533 - protein, 7 aa, synthetic construct
LSYVNWY

SEQ ID NO: 4534 - protein, 7 aa, synthetic construct
LTYLNWY

SEQ ID NO: 4535 - protein, 7 aa, synthetic construct
ISYLNWY

SEQ ID NO: 4536 - protein, 7 aa, synthetic construct
SSYLNWY

SEQ ID NO: 4537 - protein, 7 aa, synthetic construct
ISYVNWY

SEQ ID NO: 4538 - protein, 7 aa, synthetic construct
STYLNWY

SEQ ID NO: 4539 - protein, 7 aa, synthetic construct
LSYVNWY

SEQ ID NO: 4540 - protein, 7 aa, synthetic construct
VSYVNWY

SEQ ID NO: 4541 - protein, 7 aa, synthetic construct
LSYVNWY

SEQ ID NO: 4542 - protein, 7 aa, synthetic construct
VSYLNWY

SEQ ID NO: 4543 - protein, 7 aa, synthetic construct
LTYLNWY

SEQ ID NO: 4544 - protein, 7 aa, synthetic construct
VTYLNWY

SEQ ID NO: 4545 - protein, 7 aa, synthetic construct
LSYLNWY

SEQ ID NO: 4546 - protein, 7 aa, synthetic construct
LSYVNWY

SEQ ID NO: 4547 - protein, 7 aa, synthetic construct
LTYLNWY

SEQ ID NO: 4548 - protein, 7 aa, synthetic construct
LTYLNWY

SEQ ID NO: 4549 - protein, 7 aa, synthetic construct
LTYLNWY

SEQ ID NO: 4550 - protein, 7 aa, synthetic construct
VTYLNWY

SEQ ID NO: 4551 - protein, 7 aa, synthetic construct
LTYVNWY

SEQ ID NO: 4552 - protein, 7 aa, synthetic construct
VTYLNWY

SEQ ID NO: 4553 - protein, 7 aa, synthetic construct
LTYLNWY

SEQ ID NO: 4554 - protein, 7 aa, synthetic construct
LTYVNWY

SEQ ID NO: 4555 - protein, 7 aa, synthetic construct
VSYLNWY

SEQ ID NO: 4556 - protein, 7 aa, synthetic construct
LSYVNWY

SEQ ID NO: 4557 - protein, 7 aa, synthetic construct
LTYVNWY

SEQ ID NO: 4558 - protein, 7 aa, synthetic construct
LTYLNWY

SEQ ID NO: 4559 - protein, 7 aa, synthetic construct
VSYVNWY

SEQ ID NO: 4560 - protein, 7 aa, synthetic construct
STYLNWY

SEQ ID NO: 4561 - protein, 7 aa, synthetic construct
LTYLNWY

SEQ ID NO: 4562 - protein, 7 aa, synthetic construct
LSYLNWY

SEQ ID NO: 4563 - protein, 7 aa, synthetic construct
VTYLNWY

SEQ ID NO: 4564 - protein, 7 aa, synthetic construct
ITYLNWY

SEQ ID NO: 4565 - protein, 7 aa, synthetic construct
LSYLNWY

SEQ ID NO: 4566 - protein, 7 aa, synthetic construct
LTYVNWY

SEQ ID NO: 4567 - protein, 7 aa, synthetic construct
LTYLNWY

SEQ ID NO: 4568 - protein, 7 aa, synthetic construct
VSYLNWY

SEQ ID NO: 4569 - protein, 7 aa, synthetic construct
VSYVNWY

SEQ ID NO: 4570 - protein, 7 aa, synthetic construct
LTYVNWY

SEQ ID NO: 4571 - protein, 7 aa, synthetic construct
LTYLNWY

SEQ ID NO: 4572 - protein, 7 aa, synthetic construct
VSYLNWY

SEQ ID NO: 4573 - protein, 7 aa, synthetic construct
LTYLNWY

SEQ ID NO: 4574 - protein, 7 aa, synthetic construct
VTYLNWY

SEQ ID NO: 4575 - protein, 7 aa, synthetic construct
LTYLNWY

SEQ ID NO: 4576 - protein, 7 aa, synthetic construct
LSYVNWY

SEQ ID NO: 4577 - protein, 7 aa, synthetic construct
VSYLNWY

SEQ ID NO: 4578 - protein, 7 aa, synthetic construct
LTYVNWY

SEQ ID NO: 4579 - protein, 7 aa, synthetic construct
LSYLNWY

SEQ ID NO: 4580 - protein, 7 aa, synthetic construct
LSYLNWY

SEQ ID NO: 4581 - protein, 7 aa, synthetic construct
ISYVNWY

SEQ ID NO: 4582 - protein, 7 aa, synthetic construct
LSYLNWY

SEQ ID NO: 4583 - protein, 7 aa, synthetic construct
LTYVNWY

SEQ ID NO: 4584 - protein, 7 aa, synthetic construct
SSYLNWY

SEQ ID NO: 4585 - protein, 7 aa, synthetic construct
LTYVNWY

SEQ ID NO: 4586 - protein, 7 aa, synthetic construct
VRYLNWY

SEQ ID NO: 4587 - protein, 7 aa, synthetic construct
VSYLNWY

SEQ ID NO: 4588 - protein, 7 aa, synthetic construct
ISYVNWY

SEQ ID NO: 4589 - protein, 7 aa, synthetic construct
LSYLNWY

SEQ ID NO: 4590 - protein, 7 aa, synthetic construct
ISYVNWY

SEQ ID NO: 4591 - protein, 7 aa, synthetic construct
LSYLNWY

SEQ ID NO: 4592 - protein, 7 aa, synthetic construct
LTYLNWY

SEQ ID NO: 4593 - protein, 7 aa, synthetic construct
VTYLNWY

SEQ ID NO: 4594 - protein, 7 aa, synthetic construct
LSYLNWY

SEQ ID NO: 4595 - protein, 7 aa, synthetic construct
VTYLNWY

SEQ ID NO: 4596 - protein, 7 aa, synthetic construct
LTYLNWY

SEQ ID NO: 4597 - protein, 7 aa, synthetic construct
LTYLNWY

SEQ ID NO: 4598 - protein, 7 aa, synthetic construct
LTYVNWY

SEQ ID NO: 4599 - protein, 7 aa, synthetic construct
LTYLNWY

SEQ ID NO: 4600 - protein, 7 aa, synthetic construct
LTYLNWY

SEQ ID NO: 4601 - protein, 7 aa, synthetic construct
LSYLNWY

SEQ ID NO: 4602 - protein, 7 aa, synthetic construct
LSYLNWY

SEQ ID NO: 4603 - protein, 7 aa, synthetic construct
LSYLNWY

SEQ ID NO: 4604 - protein, 7 aa, synthetic construct
LSYLNWY

SEQ ID NO: 4605 - protein, 7 aa, synthetic construct
LSYLNWY

SEQ ID NO: 4606 - protein, 7 aa, synthetic construct
LSYLNWY

SEQ ID NO: 4607 - protein, 7 aa, synthetic construct
VSYVNWY

SEQ ID NO: 4608 - protein, 7 aa, synthetic construct
VSYLNWY

SEQ ID NO: 4609 - protein, 7 aa, synthetic construct
LSYVNWY

SEQ ID NO: 4610 - protein, 7 aa, synthetic construct
LSYLNWY

SEQ ID NO: 4611 - protein, 7 aa, synthetic construct
LTYLNWY

SEQ ID NO: 4612 - protein, 7 aa, synthetic construct
LSYVNWY

SEQ ID NO: 4613 - protein, 7 aa, synthetic construct
LSYLNWY

SEQ ID NO: 4614 - protein, 7 aa, synthetic construct
LSYVNWY

SEQ ID NO: 4615 - protein, 7 aa, synthetic construct
LSYLNWY

SEQ ID NO: 4616 - protein, 7 aa, synthetic construct
SSYLNWY

SEQ ID NO: 4617 - protein, 7 aa, synthetic construct
LSYVNWY

SEQ ID NO: 4618 - protein, 7 aa, synthetic construct
LTYVNWY

SEQ ID NO: 4619 - protein, 7 aa, synthetic construct
SSYLNWY

SEQ ID NO: 4620 - protein, 7 aa, synthetic construct
LTYVNWY

SEQ ID NO: 4621 - protein, 7 aa, synthetic construct
ISYVNWY

SEQ ID NO: 4622 - protein, 7 aa, synthetic construct
VSYVNWY

SEQ ID NO: 4623 - protein, 7 aa, synthetic construct
LSYVNWY

SEQ ID NO: 4624 - protein, 7 aa, synthetic construct
LTYLNWY

SEQ ID NO: 4625 - protein, 7 aa, synthetic construct
LTYVNWY

SEQ ID NO: 4626 - protein, 7 aa, synthetic construct
SRYLNWY

SEQ ID NO: 4627 - protein, 10 aa, synthetic construct
LLIYAATSRH

SEQ ID NO: 4628 - protein, 10 aa, synthetic construct
LLIYAASSLQ

SEQ ID NO: 4629 - protein, 10 aa, synthetic construct
LLIYAATSRA

SEQ ID NO: 4630 - protein, 10 aa, synthetic construct
LLIYAATSRH

SEQ ID NO: 4631 - protein, 10 aa, synthetic construct
LLIYAATSRA

SEQ ID NO: 4632 - protein, 10 aa, synthetic construct
LLIYAATSRA

SEQ ID NO: 4633 - protein, 10 aa, synthetic construct
LVIYAATSLA

SEQ ID NO: 4634 - protein, 10 aa, synthetic construct
LVIYAATSLA

SEQ ID NO: 4635 - protein, 10 aa, synthetic construct
LVIYAATSRA

SEQ ID NO: 4636 - protein, 10 aa, synthetic construct
LLIYAATSRH

SEQ ID NO: 4637 - protein, 10 aa, synthetic construct
LLIYAASSLQ

SEQ ID NO: 4638 - protein, 10 aa, synthetic construct
LVIYAATSRA

SEQ ID NO: 4639 - protein, 10 aa, synthetic construct
LVIYAVTSRA

SEQ ID NO: 4640 - protein, 10 aa, synthetic construct
LVIYATTSRA

SEQ ID NO: 4641 - protein, 10 aa, synthetic construct
LLIYAATSRA

SEQ ID NO: 4642 - protein, 10 aa, synthetic construct
LLIYAATSRH

SEQ ID NO: 4643 - protein, 10 aa, synthetic construct
LVIYAATSRH

SEQ ID NO: 4644 - protein, 10 aa, synthetic construct
LLIYAATSRH

SEQ ID NO: 4645 - protein, 10 aa, synthetic construct
LLIYAATSRA

SEQ ID NO: 4646 - protein, 10 aa, synthetic construct
LLIYATTSRH

SEQ ID NO: 4647 - protein, 10 aa, synthetic construct
LLIYAATSRH

SEQ ID NO: 4648 - protein, 10 aa, synthetic construct
LLIYAVTSRA

SEQ ID NO: 4649 - protein, 10 aa, synthetic construct
LLIYAATSLA

SEQ ID NO: 4650 - protein, 10 aa, synthetic construct
LLIYAATSLH

SEQ ID NO: 4651 - protein, 10 aa, synthetic construct
LVIYAATSRA

SEQ ID NO: 4652 - protein, 10 aa, synthetic construct
LLIYAATSRA

SEQ ID NO: 4653 - protein, 10 aa, synthetic construct
LVIYAATSLA

SEQ ID NO: 4654 - protein, 10 aa, synthetic construct
LLIYAATSRA

SEQ ID NO: 4655 - protein, 10 aa, synthetic construct
LLIYAVTSRA

SEQ ID NO: 4656 - protein, 10 aa, synthetic construct
LLIYAATSRA

SEQ ID NO: 4657 - protein, 10 aa, synthetic construct
LVIYAATSLA

SEQ ID NO: 4658 - protein, 10 aa, synthetic construct
LVIYAATSRH

SEQ ID NO: 4659 - protein, 10 aa, synthetic construct
LVIYAATSRA

SEQ ID NO: 4660 - protein, 10 aa, synthetic construct
LLIYAATSRH

SEQ ID NO: 4661 - protein, 10 aa, synthetic construct
LLIYAASSLQ

SEQ ID NO: 4662 - protein, 10 aa, synthetic construct
LVIYAATSRA

SEQ ID NO: 4663 - protein, 10 aa, synthetic construct
LVIYAATSRA

SEQ ID NO: 4664 - protein, 10 aa, synthetic construct
LLIYAASSLQ

SEQ ID NO: 4665 - protein, 10 aa, synthetic construct
LLIYAATSLA

SEQ ID NO: 4666 - protein, 10 aa, synthetic construct
LLIYAVTSRA

SEQ ID NO: 4667 - protein, 10 aa, synthetic construct
LVIYAVTSRA

SEQ ID NO: 4668 - protein, 10 aa, synthetic construct
LLIYAATSRH

SEQ ID NO: 4669 - protein, 10 aa, synthetic construct
LLIYAATSLA

SEQ ID NO: 4670 - protein, 10 aa, synthetic construct
LLIYAASSLQ

SEQ ID NO: 4671 - protein, 10 aa, synthetic construct
LVIYAVTSRA

SEQ ID NO: 4672 - protein, 10 aa, synthetic construct
LLIYAASSLQ

SEQ ID NO: 4673 - protein, 10 aa, synthetic construct
LVIYAATSRA

SEQ ID NO: 4674 - protein, 10 aa, synthetic construct
LVIYATTSRA

SEQ ID NO: 4675 - protein, 10 aa, synthetic construct
LVIYAATSRA

SEQ ID NO: 4676 - protein, 10 aa, synthetic construct
LLIYAATSLA

SEQ ID NO: 4677 - protein, 10 aa, synthetic construct
LVIYATTSRH

SEQ ID NO: 4678 - protein, 10 aa, synthetic construct
LVIYAATSRA

SEQ ID NO: 4679 - protein, 10 aa, synthetic construct
LVIYAATSRA

SEQ ID NO: 4680 - protein, 10 aa, synthetic construct
LLIYAATSRA

SEQ ID NO: 4681 - protein, 10 aa, synthetic construct
LVIYAATSRH

SEQ ID NO: 4682 - protein, 10 aa, synthetic construct
LLIYAASSLQ

SEQ ID NO: 4683 - protein, 10 aa, synthetic construct
LLIYAASSLQ

SEQ ID NO: 4684 - protein, 10 aa, synthetic construct
LVIYAATSRA

SEQ ID NO: 4685 - protein, 10 aa, synthetic construct
LVIYAATSRA

SEQ ID NO: 4686 - protein, 10 aa, synthetic construct
LVIYAATSRH

SEQ ID NO: 4687 - protein, 10 aa, synthetic construct
LVIYATTSRA

SEQ ID NO: 4688 - protein, 10 aa, synthetic construct
LLIYAATSRH

SEQ ID NO: 4689 - protein, 10 aa, synthetic construct
LVIYAATSRH

SEQ ID NO: 4690 - protein, 10 aa, synthetic construct
LLIYAATSRA

SEQ ID NO: 4691 - protein, 10 aa, synthetic construct
LLIYAATSRA

SEQ ID NO: 4692 - protein, 10 aa, synthetic construct
LLIYAATSLA

SEQ ID NO: 4693 - protein, 10 aa, synthetic construct
LVIYAATSRA

SEQ ID NO: 4694 - protein, 10 aa, synthetic construct
LLIYATTSRA

SEQ ID NO: 4695 - protein, 10 aa, synthetic construct
LVIYAVTSRH

SEQ ID NO: 4696 - protein, 10 aa, synthetic construct
LVIYATTSLA

SEQ ID NO: 4697 - protein, 10 aa, synthetic construct
LVIYAATSRH

SEQ ID NO: 4698 - protein, 10 aa, synthetic construct
LLIYAATSRH

SEQ ID NO: 4699 - protein, 10 aa, synthetic construct
LLIYAATSRA

SEQ ID NO: 4700 - protein, 10 aa, synthetic construct
LLIYAATSRA

SEQ ID NO: 4701 - protein, 10 aa, synthetic construct
LLIYAATSRA

SEQ ID NO: 4702 - protein, 10 aa, synthetic construct
LLIYAATSRA

SEQ ID NO: 4703 - protein, 10 aa, synthetic construct
LLIYAATSLA

SEQ ID NO: 4704 - protein, 10 aa, synthetic construct
LLIYAVTSLH

SEQ ID NO: 4705 - protein, 10 aa, synthetic construct
LLIYAATSLA

SEQ ID NO: 4706 - protein, 10 aa, synthetic construct
LLIYAVTSRA

SEQ ID NO: 4707 - protein, 10 aa, synthetic construct
LVIYAVTSRA

SEQ ID NO: 4708 - protein, 10 aa, synthetic construct
LLIYAVTSRA

SEQ ID NO: 4709 - protein, 10 aa, synthetic construct
LLIYAATSRA

SEQ ID NO: 4710 - protein, 10 aa, synthetic construct
LLIYAATSLH

SEQ ID NO: 4711 - protein, 10 aa, synthetic construct
LVIYAATSRA

SEQ ID NO: 4712 - protein, 10 aa, synthetic construct
LLIYAATSLA

SEQ ID NO: 4713 - protein, 10 aa, synthetic construct
LLIYAATSRA

SEQ ID NO: 4714 - protein, 10 aa, synthetic construct
LLIYAATSLA

SEQ ID NO: 4715 - protein, 10 aa, synthetic construct
LVIYAVTSRA

SEQ ID NO: 4716 - protein, 10 aa, synthetic construct
LVIYAVTSRA

SEQ ID NO: 4717 - protein, 10 aa, synthetic construct
LLIYAATSRH

SEQ ID NO: 4718 - protein, 10 aa, synthetic construct
LLIYAVTSLA

SEQ ID NO: 4719 - protein, 10 aa, synthetic construct
LLIYAATSRA

SEQ ID NO: 4720 - protein, 10 aa, synthetic construct
LVIYAVTSRH

SEQ ID NO: 4721 - protein, 10 aa, synthetic construct
LVIYAATSRH

SEQ ID NO: 4722 - protein, 10 aa, synthetic construct
LVIYAATSRH

SEQ ID NO: 4723 - protein, 10 aa, synthetic construct
LVIYATTSRA

SEQ ID NO: 4724 - protein, 10 aa, synthetic construct
LVIYAATSRA

SEQ ID NO: 4725 - protein, 10 aa, synthetic construct
LVIYAATSRH

SEQ ID NO: 4726 - protein, 10 aa, synthetic construct
LLIYAATSLA

SEQ ID NO: 4727 - protein, 10 aa, synthetic construct
LLIYAATSRA

SEQ ID NO: 4728 - protein, 10 aa, synthetic construct
LVIYAATSRA

SEQ ID NO: 4729 - protein, 10 aa, synthetic construct
LVIYAATSRA

SEQ ID NO: 4730 - protein, 10 aa, synthetic construct
LVIYAATSRA

SEQ ID NO: 4731 - protein, 10 aa, synthetic construct
LVIYAATSRA

SEQ ID NO: 4732 - protein, 10 aa, synthetic construct
LVIYAATSRA

SEQ ID NO: 4733 - protein, 10 aa, synthetic construct
LLIYAATSRA

SEQ ID NO: 4734 - protein, 10 aa, synthetic construct
LLIYAATSLA

SEQ ID NO: 4735 - protein, 10 aa, synthetic construct
LLIYAATSRA

SEQ ID NO: 4736 - protein, 10 aa, synthetic construct
LVIYAATSRH

SEQ ID NO: 4737 - protein, 10 aa, synthetic construct
LLIYAATSRA

SEQ ID NO: 4738 - protein, 10 aa, synthetic construct
LLIYAATSRA

SEQ ID NO: 4739 - protein, 10 aa, synthetic construct
LVIYAATSRA

SEQ ID NO: 4740 - protein, 10 aa, synthetic construct
LLIYAATSLA

SEQ ID NO: 4741 - protein, 10 aa, synthetic construct
LLIYATTSRA

SEQ ID NO: 4742 - protein, 10 aa, synthetic construct
LLIYAASSLQ

SEQ ID NO: 4743 - protein, 10 aa, synthetic construct
LVIYAATSRA

SEQ ID NO: 4744 - protein, 10 aa, synthetic construct
LVIYAATSRA

SEQ ID NO: 4745 - protein, 10 aa, synthetic construct
LLIYAATSLA

SEQ ID NO: 4746 - protein, 10 aa, synthetic construct
LVIYAATSRA

SEQ ID NO: 4747 - protein, 10 aa, synthetic construct
LLIYAATSRH

SEQ ID NO: 4748 - protein, 10 aa, synthetic construct
LLIYAATSRH

SEQ ID NO: 4749 - protein, 10 aa, synthetic construct
LVIYAATSLA

SEQ ID NO: 4750 - protein, 10 aa, synthetic construct
LLIYAATSRA

SEQ ID NO: 4751 - protein, 10 aa, synthetic construct
LVIYAATSRA

SEQ ID NO: 4752 - protein, 10 aa, synthetic construct
LVIYAATSRA

SEQ ID NO: 4753 - protein, 10 aa, synthetic construct
LLIYAATSRA

SEQ ID NO: 4754 - protein, 10 aa, synthetic construct
LLIYAATSRA

SEQ ID NO: 4755 - protein, 10 aa, synthetic construct
LVIYAATSRA

SEQ ID NO: 4756 - protein, 10 aa, synthetic construct
LVIYAATSLA

SEQ ID NO: 4757 - protein, 10 aa, synthetic construct
LLIYAATSRA

SEQ ID NO: 4758 - protein, 10 aa, synthetic construct
LLIYAATSRH

SEQ ID NO: 4759 - protein, 10 aa, synthetic construct
LVIYAATSRA

SEQ ID NO: 4760 - protein, 10 aa, synthetic construct
LVIYAATSLH

SEQ ID NO: 4761 - protein, 10 aa, synthetic construct
LVIYAVTSLA

SEQ ID NO: 4762 - protein, 10 aa, synthetic construct
LVIYAVTSRA

SEQ ID NO: 4763 - protein, 10 aa, synthetic construct
LVIYAATSRA

SEQ ID NO: 4764 - protein, 10 aa, synthetic construct
LVIYAATSRA

SEQ ID NO: 4765 - protein, 10 aa, synthetic construct
LVIYAATSLA

SEQ ID NO: 4766 - protein, 10 aa, synthetic construct
LVIYAVTSRA

SEQ ID NO: 4767 - protein, 10 aa, synthetic construct
LVIYAATSLA

SEQ ID NO: 4768 - protein, 10 aa, synthetic construct
LVIYAATSLA

SEQ ID NO: 4769 - protein, 10 aa, synthetic construct
LVIYAATSLH

SEQ ID NO: 4770 - protein, 10 aa, synthetic construct
LVIYAATSRA

SEQ ID NO: 4771 - protein, 10 aa, synthetic construct
LLIYAATSRA

SEQ ID NO: 4772 - protein, 10 aa, synthetic construct
LLIYAATSRA

SEQ ID NO: 4773 - protein, 10 aa, synthetic construct
LVIYAVTSRA

SEQ ID NO: 4774 - protein, 10 aa, synthetic construct
LLIYAATSRA

SEQ ID NO: 4775 - protein, 10 aa, synthetic construct
LVIYAATSRA

SEQ ID NO: 4776 - protein, 10 aa, synthetic construct
LVIYAATSRA

SEQ ID NO: 4777 - protein, 10 aa, synthetic construct
LLIYAATSRA

SEQ ID NO: 4778 - protein, 10 aa, synthetic construct
LLIYAATSRA

SEQ ID NO: 4779 - protein, 10 aa, synthetic construct
LVIYAATSLA

SEQ ID NO: 4780 - protein, 10 aa, synthetic construct
LVIYAATSLA

SEQ ID NO: 4781 - protein, 10 aa, synthetic construct
LVIYAATSRA

SEQ ID NO: 4782 - protein, 10 aa, synthetic construct
LVIYAATSRA

SEQ ID NO: 4783 - protein, 10 aa, synthetic construct
LLIYAATSRA

SEQ ID NO: 4784 - protein, 10 aa, synthetic construct
LLIYAATSRA

SEQ ID NO: 4785 - protein, 10 aa, synthetic construct
LLIYAATSRH

SEQ ID NO: 4786 - protein, 10 aa, synthetic construct
LLIYAATSLA

SEQ ID NO: 4787 - protein, 10 aa, synthetic construct
LLIYAVTSRA

SEQ ID NO: 4788 - protein, 10 aa, synthetic construct
LLIYAATSRA

SEQ ID NO: 4789 - protein, 10 aa, synthetic construct
LLIYAATSLA

SEQ ID NO: 4790 - protein, 10 aa, synthetic construct
LLIYAATSRA

SEQ ID NO: 4791 - protein, 10 aa, synthetic construct
LVIYAVTSRH

SEQ ID NO: 4792 - protein, 10 aa, synthetic construct
LVIYAATSLA

SEQ ID NO: 4793 - protein, 10 aa, synthetic construct
LLIYAVTSRH

SEQ ID NO: 4794 - protein, 10 aa, synthetic construct
LLIYAASSLQ

SEQ ID NO: 4795 - protein, 10 aa, synthetic construct
LLIYAASSLQ

SEQ ID NO: 4796 - protein, 10 aa, synthetic construct
LVIYAATSRH

SEQ ID NO: 4797 - protein, 10 aa, synthetic construct
LVIYAATSRA

SEQ ID NO: 4798 - protein, 10 aa, synthetic construct
LLIYAASSLQ

SEQ ID NO: 4799 - protein, 10 aa, synthetic construct
LVIYAATSRA

SEQ ID NO: 4800 - protein, 10 aa, synthetic construct
LVIYAATSRA

SEQ ID NO: 4801 - protein, 10 aa, synthetic construct
LVIYAATSRA

SEQ ID NO: 4802 - protein, 10 aa, synthetic construct
LLIYAATSRA

SEQ ID NO: 4803 - protein, 10 aa, synthetic construct
LLIYAATSRA

SEQ ID NO: 4804 - protein, 10 aa, synthetic construct
LVIYAATSRA

SEQ ID NO: 4805 - protein, 10 aa, synthetic construct
LLIYAVTSLA

SEQ ID NO: 4806 - protein, 8 aa, synthetic construct
QQSYNSPL

SEQ ID NO: 4807 - protein, 8 aa, synthetic construct
QQSYSTPL

SEQ ID NO: 4808 - protein, 8 aa, synthetic construct
QQSYETPL

SEQ ID NO: 4809 - protein, 8 aa, synthetic construct
QQSYDTPL

SEQ ID NO: 4810 - protein, 8 aa, synthetic construct
QQSYDNPL

SEQ ID NO: 4811 - protein, 8 aa, synthetic construct
QQSYNTPL

SEQ ID NO: 4812 - protein, 8 aa, synthetic construct
QQSYDTPL

SEQ ID NO: 4813 - protein, 8 aa, synthetic construct
QQSYENPL

SEQ ID NO: 4814 - protein, 8 aa, synthetic construct
QQSYNSPL

SEQ ID NO: 4815 - protein, 8 aa, synthetic construct
QQSYENPL

SEQ ID NO: 4816 - protein, 8 aa, synthetic construct
QQSYSTPL

SEQ ID NO: 4817 - protein, 8 aa, synthetic construct
QQSYNSPL

SEQ ID NO: 4818 - protein, 8 aa, synthetic construct
QQSYELPL

SEQ ID NO: 4819 - protein, 8 aa, synthetic construct
QQSYNSPL

SEQ ID NO: 4820 - protein, 8 aa, synthetic construct
QQSYSSPL

SEQ ID NO: 4821 - protein, 8 aa, synthetic construct
QQSYSNPL

SEQ ID NO: 4822 - protein, 8 aa, synthetic construct
QQSYDNPL

SEQ ID NO: 4823 - protein, 8 aa, synthetic construct
QQSYNTPL

SEQ ID NO: 4824 - protein, 8 aa, synthetic construct
QQSYSSPL

SEQ ID NO: 4825 - protein, 8 aa, synthetic construct
QQSYDSPL

SEQ ID NO: 4826 - protein, 8 aa, synthetic construct
QQSYDTPL

SEQ ID NO: 4827 - protein, 8 aa, synthetic construct
QQSYDSPL

SEQ ID NO: 4828 - protein, 8 aa, synthetic construct
QQSYDLPL

SEQ ID NO: 4829 - protein, 8 aa, synthetic construct
QQSYNNPL

SEQ ID NO: 4830 - protein, 8 aa, synthetic construct
QQSYSTPL

SEQ ID NO: 4831 - protein, 8 aa, synthetic construct
QQSYELPL

SEQ ID NO: 4832 - protein, 8 aa, synthetic construct
QQSYDTPL

SEQ ID NO: 4833 - protein, 8 aa, synthetic construct
QQSYNLPL

SEQ ID NO: 4834 - protein, 8 aa, synthetic construct
QQSYETPL

SEQ ID NO: 4835 - protein, 8 aa, synthetic construct
QQSYDTPL

SEQ ID NO: 4836 - protein, 8 aa, synthetic construct
QQSYNSPL

SEQ ID NO: 4837 - protein, 8 aa, synthetic construct
QQSDDLPL

SEQ ID NO: 4838 - protein, 8 aa, synthetic construct
QQSYESPL

SEQ ID NO: 4839 - protein, 8 aa, synthetic construct
QQSYDSPL

SEQ ID NO: 4840 - protein, 8 aa, synthetic construct
QQSYSTPL

SEQ ID NO: 4841 - protein, 8 aa, synthetic construct
QQSYDLPL

SEQ ID NO: 4842 - protein, 8 aa, synthetic construct
QQSYDSPL

SEQ ID NO: 4843 - protein, 8 aa, synthetic construct
QQSYSTPL

SEQ ID NO: 4844 - protein, 8 aa, synthetic construct
QQSYDLPL

SEQ ID NO: 4845 - protein, 8 aa, synthetic construct
QQSYENPL

SEQ ID NO: 4846 - protein, 8 aa, synthetic construct
QQSYELPL

SEQ ID NO: 4847 - protein, 8 aa, synthetic construct
QQSYDTPL

SEQ ID NO: 4848 - protein, 8 aa, synthetic construct
QQSYSTPL

SEQ ID NO: 4849 - protein, 8 aa, synthetic construct
QQSYSTPL

SEQ ID NO: 4850 - protein, 8 aa, synthetic construct
QQSYDSPL

SEQ ID NO: 4851 - protein, 8 aa, synthetic construct
QQSYETPL

SEQ ID NO: 4852 - protein, 8 aa, synthetic construct
QQSYESPL

SEQ ID NO: 4853 - protein, 8 aa, synthetic construct
QQSYESPL

SEQ ID NO: 4854 - protein, 8 aa, synthetic construct
QQSYESPL

SEQ ID NO: 4855 - protein, 8 aa, synthetic construct
QQSYDTPL

SEQ ID NO: 4856 - protein, 8 aa, synthetic construct
QQSYNSPL

SEQ ID NO: 4857 - protein, 8 aa, synthetic construct
QQSYENPL

SEQ ID NO: 4858 - protein, 8 aa, synthetic construct
QQSYDLPL

SEQ ID NO: 4859 - protein, 8 aa, synthetic construct
QQSYDSPL

SEQ ID NO: 4860 - protein, 8 aa, synthetic construct
QQSYDSPL

SEQ ID NO: 4861 - protein, 8 aa, synthetic construct
QQSYDLPL

SEQ ID NO: 4862 - protein, 8 aa, synthetic construct
QQSYSTPL

SEQ ID NO: 4863 - protein, 8 aa, synthetic construct
QQSYDSPL

SEQ ID NO: 4864 - protein, 8 aa, synthetic construct
QQSYNNPL

SEQ ID NO: 4865 - protein, 8 aa, synthetic construct
QQGYDLPL

SEQ ID NO: 4866 - protein, 8 aa, synthetic construct
QQSYETPL

SEQ ID NO: 4867 - protein, 8 aa, synthetic construct
QQSYNTPL

SEQ ID NO: 4868 - protein, 8 aa, synthetic construct
QQSYDTPL

SEQ ID NO: 4869 - protein, 8 aa, synthetic construct
QQSYENPL

SEQ ID NO: 4870 - protein, 8 aa, synthetic construct
QQSYESPL

SEQ ID NO: 4871 - protein, 8 aa, synthetic construct
QQSDSSPL

SEQ ID NO: 4872 - protein, 8 aa, synthetic construct
QQSYENPL

SEQ ID NO: 4873 - protein, 8 aa, synthetic construct
QQSYDNPL

SEQ ID NO: 4874 - protein, 8 aa, synthetic construct
QQSYDSPL

SEQ ID NO: 4875 - protein, 8 aa, synthetic construct
QQSYDTPL

SEQ ID NO: 4876 - protein, 8 aa, synthetic construct
QQSYNNPL

SEQ ID NO: 4877 - protein, 8 aa, synthetic construct
QQSYDNPL

SEQ ID NO: 4878 - protein, 8 aa, synthetic construct
QQSYSTPL

SEQ ID NO: 4879 - protein, 8 aa, synthetic construct
QQSYDSPL

SEQ ID NO: 4880 - protein, 8 aa, synthetic construct
QQSYDTPL

SEQ ID NO: 4881 - protein, 8 aa, synthetic construct
QQSYDSPL

SEQ ID NO: 4882 - protein, 8 aa, synthetic construct
QQSYENPL

SEQ ID NO: 4883 - protein, 8 aa, synthetic construct
QQSYESPL

SEQ ID NO: 4884 - protein, 8 aa, synthetic construct
QQSYESPL

SEQ ID NO: 4885 - protein, 8 aa, synthetic construct
QQSYNSPL

SEQ ID NO: 4886 - protein, 8 aa, synthetic construct
QQSYESPL

SEQ ID NO: 4887 - protein, 8 aa, synthetic construct
QQSYDLPL

SEQ ID NO: 4888 - protein, 8 aa, synthetic construct
QQSYDLPL

SEQ ID NO: 4889 - protein, 8 aa, synthetic construct
QQSYESPL

SEQ ID NO: 4890 - protein, 8 aa, synthetic construct
QQSDSTPL

SEQ ID NO: 4891 - protein, 8 aa, synthetic construct
QQSYDSPL

SEQ ID NO: 4892 - protein, 8 aa, synthetic construct
QQSYNSPL

SEQ ID NO: 4893 - protein, 8 aa, synthetic construct
QQSYSLPL

SEQ ID NO: 4894 - protein, 8 aa, synthetic construct
QQSYDLPL

SEQ ID NO: 4895 - protein, 8 aa, synthetic construct
QQSYDTPL

SEQ ID NO: 4896 - protein, 8 aa, synthetic construct
QQSYENPL

SEQ ID NO: 4897 - protein, 8 aa, synthetic construct
QQSYETPL

SEQ ID NO: 4898 - protein, 8 aa, synthetic construct
QQSYSSPL

SEQ ID NO: 4899 - protein, 8 aa, synthetic construct
QQSYDSPL

SEQ ID NO: 4900 - protein, 8 aa, synthetic construct
QQSYDSPL

SEQ ID NO: 4901 - protein, 8 aa, synthetic construct
QQSYDSPL

SEQ ID NO: 4902 - protein, 8 aa, synthetic construct
QQSYNLPL

SEQ ID NO: 4903 - protein, 8 aa, synthetic construct
QQSYDNPL

SEQ ID NO: 4904 - protein, 8 aa, synthetic construct
QQSYESPL

SEQ ID NO: 4905 - protein, 8 aa, synthetic construct
QQSYDTPL

SEQ ID NO: 4906 - protein, 8 aa, synthetic construct
QQSYDLPL

SEQ ID NO: 4907 - protein, 8 aa, synthetic construct
QQSYDTPL

SEQ ID NO: 4908 - protein, 8 aa, synthetic construct
QQSYSNPL

SEQ ID NO: 4909 - protein, 8 aa, synthetic construct
QQSYELPL

SEQ ID NO: 4910 - protein, 8 aa, synthetic construct
QQSYDSPL

SEQ ID NO: 4911 - protein, 8 aa, synthetic construct
QQSYETPL

SEQ ID NO: 4912 - protein, 8 aa, synthetic construct
QQSYDNPL

SEQ ID NO: 4913 - protein, 8 aa, synthetic construct
QQSYDTPL

SEQ ID NO: 4914 - protein, 8 aa, synthetic construct
QQSYSLPL

SEQ ID NO: 4915 - protein, 8 aa, synthetic construct
QQSYETPL

SEQ ID NO: 4916 - protein, 8 aa, synthetic construct
QQSYDTPL

SEQ ID NO: 4917 - protein, 8 aa, synthetic construct
QQSYNLPL

SEQ ID NO: 4918 - protein, 8 aa, synthetic construct
QQSYETPL

SEQ ID NO: 4919 - protein, 8 aa, synthetic construct
QQSYDSPL

SEQ ID NO: 4920 - protein, 8 aa, synthetic construct
QQSYENPL

SEQ ID NO: 4921 - protein, 8 aa, synthetic construct
QQSYDSPL

SEQ ID NO: 4922 - protein, 8 aa, synthetic construct
QQSDDSPL

SEQ ID NO: 4923 - protein, 8 aa, synthetic construct
QQSYDSPL

SEQ ID NO: 4924 - protein, 8 aa, synthetic construct
QQSYDSPL

SEQ ID NO: 4925 - protein, 8 aa, synthetic construct
QQSYDSPL

SEQ ID NO: 4926 - protein, 8 aa, synthetic construct
QQSYESPL

SEQ ID NO: 4927 - protein, 8 aa, synthetic construct
QQSYELPL

SEQ ID NO: 4928 - protein, 8 aa, synthetic construct
QQSYDTPL

SEQ ID NO: 4929 - protein, 8 aa, synthetic construct
QQSYETPL

SEQ ID NO: 4930 - protein, 8 aa, synthetic construct
QQSYELPL

SEQ ID NO: 4931 - protein, 8 aa, synthetic construct
QQSDNSPL

SEQ ID NO: 4932 - protein, 8 aa, synthetic construct
QQSYDTPL

SEQ ID NO: 4933 - protein, 8 aa, synthetic construct
QQSYDTPL

SEQ ID NO: 4934 - protein, 8 aa, synthetic construct
QQSYDSPL

SEQ ID NO: 4935 - protein, 8 aa, synthetic construct
QQSYNSPL

SEQ ID NO: 4936 - protein, 8 aa, synthetic construct
QQSYDNPL

SEQ ID NO: 4937 - protein, 8 aa, synthetic construct
QQSYDSPL

SEQ ID NO: 4938 - protein, 8 aa, synthetic construct
QQSYDNPL

SEQ ID NO: 4939 - protein, 8 aa, synthetic construct
QQSYSTPL

SEQ ID NO: 4940 - protein, 8 aa, synthetic construct
QQSYESPL

SEQ ID NO: 4941 - protein, 8 aa, synthetic construct
QQSYDTPL

SEQ ID NO: 4942 - protein, 8 aa, synthetic construct
QQSDDTPL

SEQ ID NO: 4943 - protein, 8 aa, synthetic construct
QQSYDSPL

SEQ ID NO: 4944 - protein, 8 aa, synthetic construct
QQSYELPL

SEQ ID NO: 4945 - protein, 8 aa, synthetic construct
QQSYDSPL

SEQ ID NO: 4946 - protein, 8 aa, synthetic construct
QQSYDSPL

SEQ ID NO: 4947 - protein, 8 aa, synthetic construct
QQSYENPL

SEQ ID NO: 4948 - protein, 8 aa, synthetic construct
QQSYSNPL

SEQ ID NO: 4949 - protein, 8 aa, synthetic construct
QQSYNTPL

SEQ ID NO: 4950 - protein, 8 aa, synthetic construct
QQSYDTPL

SEQ ID NO: 4951 - protein, 8 aa, synthetic construct
QQSYESPL

SEQ ID NO: 4952 - protein, 8 aa, synthetic construct
QQSYETPL

SEQ ID NO: 4953 - protein, 8 aa, synthetic construct
QQSYDTPL

SEQ ID NO: 4954 - protein, 8 aa, synthetic construct
QQSYESPL

SEQ ID NO: 4955 - protein, 8 aa, synthetic construct
QQSYETPL

SEQ ID NO: 4956 - protein, 8 aa, synthetic construct
QQSDDSPL

SEQ ID NO: 4957 - protein, 8 aa, synthetic construct
QQSYSSPL

SEQ ID NO: 4958 - protein, 8 aa, synthetic construct
QQSYDNPL

SEQ ID NO: 4959 - protein, 8 aa, synthetic construct
QQSYSSPL

SEQ ID NO: 4960 - protein, 8 aa, synthetic construct
QQSYDSPL

SEQ ID NO: 4961 - protein, 8 aa, synthetic construct
QQSYDNPL

SEQ ID NO: 4962 - protein, 8 aa, synthetic construct
QQSYDSPL

SEQ ID NO: 4963 - protein, 8 aa, synthetic construct
QQSYDSPL

SEQ ID NO: 4964 - protein, 8 aa, synthetic construct
QQSYDNPL

SEQ ID NO: 4965 - protein, 8 aa, synthetic construct
QQSYDSPL

SEQ ID NO: 4966 - protein, 8 aa, synthetic construct
QQSYDSPL

SEQ ID NO: 4967 - protein, 8 aa, synthetic construct
QQSYDTPL

SEQ ID NO: 4968 - protein, 8 aa, synthetic construct
QQSYSSPL

SEQ ID NO: 4969 - protein, 8 aa, synthetic construct
QQSYSTPL

SEQ ID NO: 4970 - protein, 8 aa, synthetic construct
QQSYDSPL

SEQ ID NO: 4971 - protein, 8 aa, synthetic construct
QQSYSTPL

SEQ ID NO: 4972 - protein, 8 aa, synthetic construct
QQSYDNPL

SEQ ID NO: 4973 - protein, 8 aa, synthetic construct
QQSYSTPL

SEQ ID NO: 4974 - protein, 8 aa, synthetic construct
QQSYSTPL

SEQ ID NO: 4975 - protein, 8 aa, synthetic construct
QQSDNTPL

SEQ ID NO: 4976 - protein, 8 aa, synthetic construct
QQSYELPL

SEQ ID NO: 4977 - protein, 8 aa, synthetic construct
QQSYSTPL

SEQ ID NO: 4978 - protein, 8 aa, synthetic construct
QQSYETPL

SEQ ID NO: 4979 - protein, 8 aa, synthetic construct
QQSYESPL

SEQ ID NO: 4980 - protein, 8 aa, synthetic construct
QQSYNSPL

SEQ ID NO: 4981 - protein, 8 aa, synthetic construct
QQSYESPL

SEQ ID NO: 4982 - protein, 8 aa, synthetic construct
QQSYSTPL

SEQ ID NO: 4983 - protein, 8 aa, synthetic construct
QQSYDLPL

SEQ ID NO: 4984 - protein, 8 aa, synthetic construct
QQSYESPL

SEQ ID NO: 4985 - protein, 12 aa, synthetic construct
  VARIANT 10: note = any amino acid
ARSATWHDTXLD

SEQ ID NO: 4986 - protein, 12 aa, synthetic construct
  VARIANT 10: note = A or H
ARAANWHDTXLD

SEQ ID NO: 4987 - protein, 12 aa, synthetic construct
  VARIANT 10: note = any amino acid
ARAATWHDTXLD

SEQ ID NO: 4988 - protein, 12 aa, synthetic construct
  VARIANT 10: note = H or A
ARAATWHDTXLD

SEQ ID NO: 4989 - protein, 12 aa, synthetic construct
  VARIANT 10: note = any amino acid
ARGANWHDTXLD

SEQ ID NO: 4990 - protein, 12 aa, synthetic construct
  VARIANT 10: note = A or H
ARGANWHDTXLD

SEQ ID NO: 4991 - protein, 12 aa, synthetic construct
  VARIANT 10: note = any amino acid
ARGATWHDTXLD

SEQ ID NO: 4992 - protein, 12 aa, synthetic construct
  VARIANT 10: note = A or H
ARGATWHDTXLD

SEQ ID NO: 4993 - protein, 12 aa, synthetic construct
  VARIANT 10: note = any amino acid
ARSANWHDTXLD

SEQ ID NO: 4994 - protein, 12 aa, synthetic construct
  VARIANT 2: note = R or K
  VARIANT 10: note = A or H
AXSANWHDTXLD

SEQ ID NO: 4995 - protein, 12 aa, synthetic construct
  VARIANT 10: note = any amino acid
ARSATWHDTXLD

SEQ ID NO: 4996 - protein, 12 aa, synthetic construct
  VARIANT 10: note = H or A
ARSATWHDTXLD

SEQ ID NO: 4997 - skipped

SEQ ID NO: 4998 - protein, 13 aa, synthetic construct
  VARIANT 3: note = A or S
  VARIANT 4: note = G or N
  VARIANT 9: note = G or S
  VARIANT 12: note = T or K
  VARIANT 13: note = S or G
WVXXINYNXGYXX

SEQ ID NO: 4999 - protein, 12 aa, synthetic construct
  VARIANT 10: note = A or H
ARAANWHDTXLD

SEQ ID NO: 5000 - protein, 7 aa, synthetic construct
  VARIANT 1: note = any amino acid
  VARIANT 2: note = any amino acid
  VARIANT 4: note = L or V
XXYXNWY

SEQ ID NO: 5001 - protein, 7 aa, synthetic construct
  VARIANT 1: note = L or V or I or S
  VARIANT 2: note = S or T or R
  VARIANT 4: note = L or V
XXYXNWY

SEQ ID NO: 5002-5003 - skipped (2 entries)

SEQ ID NO: 5004 - protein, 8 aa, synthetic construct
  VARIANT 2: note = Q or H
  VARIANT 4: note = Y or D
  VARIANT 5: note = any amino acid
  VARIANT 6: note = any amino acid
QXSXXXPL

SEQ ID NO: 5005 - protein, 8 aa, synthetic construct
  VARIANT 2: note = Q or H
  VARIANT 4: note = Y or D
  VARIANT 5: note = D or E or S or N
  VARIANT 6: note = L, N, S or T
QXSXXXPL

SEQ ID NO: 5006 - protein, 12 aa, synthetic construct
  VARIANT 10: note = H or A
ARAATWHDTXLD

SEQ ID NO: 5007 - protein, 7 aa, synthetic construct
  VARIANT 1: note = any amino acid
  VARIANT 2: note = S or T
  VARIANT 4: note = L or V
XXYXNWY

SEQ ID NO: 5008 - protein, 7 aa, synthetic construct
  VARIANT 1: note = L or V or I or S
  VARIANT 2: note = S or T
  VARIANT 4: note = L or V
XXYXNWY

SEQ ID NO: 5009-5010 - skipped (2 entries)

SEQ ID NO: 5011 - protein, 8 aa, synthetic construct
  VARIANT 4: note = Y, D or N
  VARIANT 5: note = any amino acid
  VARIANT 6: note = any amino acid
QQSXXXPL

SEQ ID NO: 5012 - protein, 8 aa, synthetic construct
  VARIANT 4: note = Y or D or N
  VARIANT 5: note = D or E or S or N
  VARIANT 6: note = L or S or T or N
QQSXXXPL

SEQ ID NO: 5013 - skipped

SEQ ID NO: 5014 - protein, 13 aa, synthetic construct
  VARIANT 3: note = S or A
  VARIANT 4: note = G or S or N
  VARIANT 9: note = G or S
  VARIANT 12: note = T or K
  VARIANT 13: note = S or G
WVXXINYNXGYXX

SEQ ID NO: 5015 - protein, 7 aa, synthetic construct
  VARIANT 1: note = any amino acid
  VARIANT 2: note = S or T
  VARIANT 4: note = L or V
XXYXNWY

SEQ ID NO: 5016 - protein, 7 aa, synthetic construct
  VARIANT 1: note = L or V or S or I
  VARIANT 2: note = S or T
  VARIANT 4: note = L or V
XXYXNWY

SEQ ID NO: 5017 - protein, 10 aa, synthetic construct
  VARIANT 2: note = L or V
  VARIANT 6: note = any amino acid
  VARIANT 7: note = T or S
  VARIANT 9: note = any amino acid
  VARIANT 10: note = any amino acid
LXIYAXXSXX

SEQ ID NO: 5018 - protein, 10 aa, synthetic construct
  VARIANT 2: note = L or V
  VARIANT 6: note = A or V or T
  VARIANT 7: note = T or S
  VARIANT 9: note = R or L
  VARIANT 10: note = A or H or Q
LXIYAXXSXX

SEQ ID NO: 5019 - protein, 8 aa, synthetic construct
  VARIANT 4: note = G or D
  VARIANT 5: note = any amino acid
  VARIANT 6: note = any amino acid
QQSXXXPL

SEQ ID NO: 5020 - protein, 8 aa, synthetic construct
  VARIANT 4: note = Y or D
  VARIANT 5: note = D or E or S or N
  VARIANT 6: note = S or T or N or L
QQSXXXPL

SEQ ID NO: 5021 - skipped

SEQ ID NO: 5022 - protein, 13 aa, synthetic construct
  VARIANT 3: note = A or S
  VARIANT 4: note = G or N or S
  VARIANT 9: note = G or S
  VARIANT 12: note = T or K
  VARIANT 13: note = S or G
WVXXINYNXGYXX

SEQ ID NO: 5023 - protein, 7 aa, synthetic construct
  VARIANT 1: note = L or I or V or S
  VARIANT 2: note = S or T
  VARIANT 4: note = L or V
XXYXNWY

SEQ ID NO: 5024 - protein, 8 aa, synthetic construct
  VARIANT 4: note = Y or D
  VARIANT 5: note = D or E or S or N
  VARIANT 6: note = T, S or N or L
QQSXXXPL

SEQ ID NO: 5025 - skipped

SEQ ID NO: 5026 - protein, 13 aa, synthetic construct
  VARIANT 3: note = S or A
  VARIANT 4: note = G or N or S
  VARIANT 9: note = G or S
  VARIANT 12: note = T or K
  VARIANT 13: note = S or G
WVXXINYNXGYXX

SEQ ID NO: 5027 - protein, 12 aa, synthetic construct
  VARIANT 2: note = R or K
  VARIANT 10: note = A or H
AXSANWHDTXLD

SEQ ID NO: 5028-5029 - skipped (2 entries)

SEQ ID NO: 5030 - protein, 8 aa, synthetic construct
  VARIANT 4: note = Y or D
  VARIANT 5: note = D or E or N or S
  VARIANT 6: note = S or T or L or N
QQSXXXPL

SEQ ID NO: 5031 - skipped

SEQ ID NO: 5032 - protein, 13 aa, synthetic construct
  VARIANT 3: note = A or S
  VARIANT 4: note = G or N or S
  VARIANT 9: note = G or S
  VARIANT 12: note = T or K
  VARIANT 13: note = S or G
WVXXINYNXGYXX

SEQ ID NO: 5033 - protein, 12 aa, synthetic construct
  VARIANT 10: note = H or A
ARSATWHDTXLD

SEQ ID NO: 5034 - protein, 7 aa, synthetic construct
  VARIANT 1: note = any amino acid
  VARIANT 2: note = any amino acid
  VARIANT 4: note = L or V
XXYXNWY

SEQ ID NO: 5035 - protein, 7 aa, synthetic construct
  VARIANT 1: note = L or V or I or S
  VARIANT 2: note = S or T or R
  VARIANT 4: note = L or V
XXYXNWY

SEQ ID NO: 5036-5037 - skipped (2 entries)

SEQ ID NO: 5038 - protein, 8 aa, synthetic construct
  VARIANT 4: note = Y or D
  VARIANT 5: note = D or E or S or N
  VARIANT 6: note = L or N or T or S
QQSXXXPL

SEQ ID NO: 5039 - skipped

SEQ ID NO: 5040 - protein, 8 aa, synthetic construct
  VARIANT 2: note = Q or H
  VARIANT 4: note = Y or D
  VARIANT 5: note = D or E or S or N
  VARIANT 6: note = L, N, S or T
QXSXXXPL

SEQ ID NO: 5041 - protein, 13 aa, synthetic construct
  VARIANT 3: note = S or A
  VARIANT 4: note = G or S or N
  VARIANT 9: note = G or S
  VARIANT 12: note = T or K
  VARIANT 13: note = S or G
WVXXINYNXGYXX

SEQ ID NO: 5042 - protein, 12 aa, synthetic construct
  VARIANT 10: note = H or A
ARGATWHDTXLD

SEQ ID NO: 5043 - protein, 7 aa, synthetic construct
  VARIANT 1: note = L or I or V or S
  VARIANT 2: note = S or T
  VARIANT 4: note = L or V
XXYXNWY

SEQ ID NO: 5044 - protein, 12 aa, synthetic construct
  VARIANT 2: note = R or K
  VARIANT 10: note = A or H
AXSANWHDTXLD

SEQ ID NO: 5045 - protein, 8 aa, synthetic construct
  VARIANT 4: note = Y or D
  VARIANT 5: note = D or E or N or S
  VARIANT 6: note = S or T or L or N
QQSXXXPL

SEQ ID NO: 5046 - protein, 12 aa, synthetic construct
  VARIANT 2: note = any amino acid
  VARIANT 3: note = any amino acid
  VARIANT 5: note = any amino acid
  VARIANT 10: note = any amino acid
AXXAXWHDTXLD

SEQ ID NO: 5047 - protein, 13 aa, synthetic construct
  VARIANT 3: note = A or S
  VARIANT 4: note = S or G or N
  VARIANT 9: note = G or S
  VARIANT 12: note = T or K
  VARIANT 13: note = S or G
WVXXINYNXGYXX

SEQ ID NO: 5048 - protein, 12 aa, synthetic construct
  VARIANT 10: note = A or H
ARAANWHDTXLD

SEQ ID NO: 5049 - skipped
